(19) United States
(12) Patent Application Publication
(10) Pub. No.: US 2023/0303993 A1
(43) Pub. Date: Sep. 28, 2023

(54) FOOD SUPPLEMENT COMPOSITION TO AID IN DIGESTION OF FRUCTAN, MANNITOL, AND SORBITOL

(71) Applicant: KIWI HEALTH, INC, Somerville, MA (US)

(72) Inventor: Anjie LIU, Somerville, MA (US)

(73) Assignee: KIWI HEALTH, INC, Somerville, MA (US)

(21) Appl. No.: 18/005,280

(22) PCT Filed: Jul. 23, 2021
(86) PCT No.: PCT/US2021/042879

§ 371 Date: Jan. 12, 2023

Related U.S. Application Data
(60) Provisional application No. 63/177,451, filed on Apr. 21, 2021.
(60) Provisional application No. 63/165,201, filed on Mar. 24, 2021.
(60) Provisional application No. 63/106,437, filed on Oct. 28, 2020.
(60) Provisional application No. 63/105,958, filed on Oct. 27, 2020.
(60) Provisional application No. 63/055,874, filed on Jul. 23, 2020.

(51) Int. Cl. C12N 9/24; C12N 9/92; C12N 9/04; C12N 9/40; A61P 1/14; A23L 33/17

(52) U.S. Cl. CPC C12N 9/2482; A23L 33/17; A61P 1/14; C12N 9/0006; C12N 9/2465; C12N 9/92; C12Y 101/01014; C12Y 101/01067; C12Y 302/01007

(57) ABSTRACT

The technology described herein is directed to combinations and combinations for reducing the symptoms of digestive conditions, e.g., caused by ingestion of FODMAPs.

### CROSS-REFERENCE TO RELATED APPLICATIONS

[0001] This application claims benefit under 35 U.S.C. § 119(e) of U.S. Provisional Application No. 63/055,874 filed Jul. 23, 2020; 63/105,958 filed Oct. 27, 2020; 63/106,437 filed Oct. 28, 2020; 63/165,201 filed Mar. 24, 2021; and 63/177,451 filed Apr. 21, 2021, the contents of which are incorporated herein by reference in their entireties.

### SEQUENCE LISTING

[0002] The instant application contains a Sequence Listing which has been submitted electronically in ASCII format and is hereby incorporated by reference in its entirety. Said ASCII copy, created on Jul. 21, 2021, is named 088866-098230WOPT_SL.txt and is 4,007,323 bytes in size.

### TECHNICAL FIELD

[0003] The technology described herein relates to food supplements to aid digestion.

### BACKGROUND

[0004] Many individuals, both with or without a diagnosed digestive condition, find certain foodstuffs difficult to consume. For example, certain foods can cause gas, bloating, abdominal pain, nausea, diarrhea, and/or constipation. One reason for such reaction is the presence in food of the compounds referred to as FODMAPs (fermentable oligo-, di-, monosaccharides, and polyols), a wide group of carbohydrates that includes fructans, sorbitol, and mannitol.

[0005] Fructan is a polysaccharide polymer composed of a chain of fructose molecules and typically a terminal glucose molecule. Inulin is a common type of fructan and is found in a number of common foods such as garlic, onion, banana, dates, watermelon, wheat, and barley.

[0006] The human body does not produce endogenous enzymes that target fructans as substrates. Instead, fructans, including inulin, are typically transported uncleaved and intact through the gastrointestinal tract. Along the way, they accumulate water via osmotic effect (essentially, they act in a sponge-like manner) in the intestines and become fermented by microorganisms in the lower intestines, which may produce painful or uncomfortable symptoms including but not limited to gas, bloating, distension, nausea, and impaired bowel motility, resulting in diarrhea or constipation in sensitive individuals or individuals intolerant to fructans who may be suffering from IBS, IBD, SIBO, SIFO, or other gastrointestinal conditions.

[0007] Sorbitol and mannitol are sugar alcohols, a class of polyols. Sorbitol is found in high levels in foods such as apples, pears, peaches, nectarines, apricots, and avocados. Cauliflower, celery, and several types of mushrooms contain high amounts of mannitol.

[0008] The human body does not readily absorb sorbitol and mannitol, nor does it produce enzymes that convert them to molecules more readily absorbed by the digestive tract. Similar to fructans, sorbitol and mannitol can have significant osmotic effects in the gastrointestinal tract. In the scientific literature, it has been noted that mannitol has been found to rapidly increase water load in the small intestine by up to ten times more than that effectuated by an equal amount of glucose. Sorbitol and mannitol are also commonly fermented in the lower intestines. The osmotic properties and fermentability of these molecules may produce painful or unpleasant symptoms similar to those produced by the osmotic properties and fermentability of fructans described above.

[0009] Hitherto, the established and widely accepted clinical protocol for individuals suffering from the associated afflictions is to advise such individuals to simply avoid foods and beverages that contain a significant quantity of the symptom-triggering substances. In particular, individuals suffering from illnesses including but not limited to IBS, IBD, SIBO, and SIFO are often recommended to follow a diet low in FODMAPs. Typically, it is recommended that the afflicted individuals adhere strictly to a low-FODMAP diet for several weeks; then, a period of reintroduction of various food groups (such as fructans, sorbitol, or mannitol) within the FODMAPs designation follows. During this period, certain individuals may find that they are particularly sensitive to particular classes of FODMAPs, but not to others. As a consequence, the afflicted individuals are advised to avoid foods and beverages containing sufficiently high levels of the specific FODMAP classes to which they are sensitive.

[0010] The shortcomings of such an approach are numerous. Some of the most obvious disadvantages in the approach are the deprivation of gastronomical enjoyment, restriction on the variety of nutritional sources, and dietary inconvenience. An afflicted individual, under the existing therapeutic protocol, would be doomed to a cumbersome and deprived lifestyle of constant inspection of ingredient labels on food products and inquiry into the composition of restaurant offerings or catered meals (which still leaves the individual vulnerable to mistakes on the food supplier’s part). An individual sensitive to fructans, for instance, would, at each meal, carry the responsibility of quantifying the amount of fructans in his or her intake and ensuring that the quantity is below recommended cutoff values. Often, safe ranges for certain foods are extremely narrow. For instance, the Monash University FODMAP smartphone application, with the largest FODMAP food database available to date, indicates a 0.35 oz serving of canned corned kernels as sufficiently low in fructans, thus safe (indicated by a green circle), but a 0.53 oz (approximately one tablespoon) serving as containing a moderate amount of fructans, and thus risky (indicated by a yellow circle) for consumption. Furthermore, quantities of FODMAPs such as fructan, sorbitol, and mannitol add up, and quantities of foods considered “safe” over multiple servings of various food types may accumulate to “risky” levels. The database does not to date offer a means to quantify FODMAP content, and even if it were to, it would still be incredibly tedious and frustrating to keep track of FODMAP content at every meal.

[0011] The psychological difficulty in practicing the restraint required for such a lifestyle is considerably high. For instance, one must resist culinary temptations offered in social settings and refrain from taking one more mouthful of a cherished food. Moreover, there currently exist significant knowledge gaps in the understanding of FODMAPs. The Monash University FODMAP application, though broad in its range of foods covered, is certainly far from comprehensive. Exotic fruits or vegetables encountered during travels may not be documented by the application. Moreover, preparations of certain food products may vary greatly by producer and/or country of origin. For instance, German Bratwurst sausage is listed as high in fructans (indicated by a red circle) at a serving of 7.05 oz, but tolerable at 3.53 oz. However, there are multiple ways in which German Bratwurst sausage may be prepared, for instance, from little or no garlic in the recipe to preparations with much garlic (0.11 oz of garlic is considered a serving high in fructans). The application database alone, in this scenario, will leave an afflicted individual sensitive to fructans ill-equipped to determine a reasonably safe quantity of German Bratwurst sausage to consume.

[0012] The use of an enzyme exhibiting fructan hydrolase activity and the production of an enzyme derived from a strain of Lactobacillus has been described (US20190174773), specifically the use of said enzyme in the degradation of fructan in grain and vegetable raw material. The drawbacks of such a method are such that the method can only reasonably be applied to powdered, liquid, puréed, grounded, or otherwise homogenized foodstuff. One cannot apply the enzyme to a whole ripe banana, for instance, or to a bulk of leek. Accordingly, the culinary application of this method is very much limited. Not only is the range of foods which can possibly be treated via this method limited to specific textures and preparations of ingredients, but even so, it is unreasonable to expect that the variety of food products prepared via this method will come anywhere close to the variety of ordinarily prepared (that is, with normal levels of fructan content) food products. Hence, an afflicted individual will still be severely restricted in choosing food products available to them at safe levels of fructan content, whether in the supermarket, at restaurants, social gatherings, and other dining events not specifically catered to individuals with fructan sensitivities.

[0013] Therefore, what is lacking and desired in the art is a method for individuals with fructan intolerance or sensitivity, or, more generally, issues with the presence of fructans in their digestive tracts, to break down fructan molecules and absorb the component molecules in whatever foods they may consume, regardless of texture, preparation, or composition, before symptoms arise, in any setting they may choose to enjoy their dining or snacking experience. Similarly, a method is needed for individuals sensitive or intolerant to sorbitol and/or mannitol to be able to enjoy foods and beverages containing the molecules without the unpleasant and/or painful consequences. The present disclosure is intended to provide such methods as described herein.

### SUMMARY

[0014] As noted above, humans do not readily absorb fructans, sorbitol, and mannitol, nor do they endogenously secrete enzymes that break down or convert these molecules to more readily digestible molecules in the digestive tract. Fructans, sorbitol, and mannitol typically pass through the gastrointestinal tract undigested to be fermented by colonic microbiota, which may cause painful bloating and gas, and may disrupt regularity of bowel movements in individuals sensitive to these substances and/or afflicted by IBS, IBD, SIBO, SIFO or other gastrointestinal or digestive maladies. Additionally, fructans, sorbitol, and mannitol may generate osmotic activity in the small and large intestines, inducing bloating and distention discomfort, as well as negatively affecting bowel motility.

[0015] The present invention relates to the field of gastrointestinal relief. Specifically, the present invention relates in some embodiments to a dietary supplement composition containing at least one of the following enzymes: inulinase, sorbitol dehydrogenase, and mannitol dehydrogenase. Inulinase is an enzyme that cleaves inulin, a common form of fructan, ultimately into glucose and fructose. Sorbitol dehydrogenase is an enzyme that is able to convert sorbitol to fructose. Similarly, mannitol dehydrogenase is able to convert mannitol to fructose and/or mannose.

[0016] Embodiments of the invention can help individuals afflicted with intolerance of or sensitivity to fructans, sorbitol, mannitol, or a combination of these molecules by converting those molecules in the gastrointestinal tract into more easily absorbed molecules. Fructans, sorbitol, and mannitol are known to cause gastrointestinal troubles such as, but not limited to, bloating, gas, nausea, abdominal pain, diarrhea, and constipation in individuals suffering from gastrointestinal or digestive ailments including but not limited to Irritable Bowel Syndrome (IBS), Inflammatory Bowel Disease (IBD), Small Intestinal Bacterial Overgrowth (SIBO), and Small Intestinal Fungal Overgrowth (SIFO).

[0017] It is further noted that the compositions and methods described herein provide multiple advantages over prior approaches to FODMAPs. In particular, the prior art describes attempts to treat foodstuffs during manufacturing in order to reduce or remove FODMAPs. Such treatments often alter the taste of foods, causing them to taste sweeter. In contract, the compositions and methods described herein can provide relief from symptoms caused by FODMAPs without altering the taste of the foodstuffs consumed, as the FODMAP content is not altered prior to consumption. In addition, the compositions and methods described herein can be used when dining in restaurants, cafeterias, or social settings, where the user will not have access to speciality ingredients that have been pretreated to reduce or remove FODMAPs. The compositions and methods described herein therefore offer increased relief from symptoms as they can be used more often and without the social isolation and inconvenience caused by a need to avoid restaurants, cafeterias, or meals in social settings outside the user’s home.

[0018] It is specifically noted that experts in the field have repeatedly urged that oral consumption of various enzymes that target one or more FODMAPs is not expected to address FODMAP sensitivities, particularly in relation to fructans and polyols. These experts have urged that the gastrointestinal tract conditions will not permit sufficient hydrolysis to relieve symptoms, or that the relevant FODMAPS are such relatively simple molecules that enzymes either cannot break them down or induce a change that will impact digestion. FODMAP sensitivities have long been known to medical science, but leading medical experts continue to insist on low FODMAP diets as the suitable treatment or to focus on food processing approaches as new techniques. Oral administration of therapeutic compositions to treat FODMAP sensitivities has been repeatedly discouraged and disparaged. As demonstrated in the Examples herein, the inventor has surprisingly found that orally-consumed compositions containing fructan-degrading enzymes actually exhibit striking therapeutic efficacy, reducing and in some cases entirely eliminating symptoms of FODMAP sensitivity. In some embodiments of any of the aspects, the present invention relates to a composition and method for degrading fructans and converting sorbitol and mannitol present in common food sources into molecules absorbable by the gastrointestinal tract before the fructan, sorbitol, and mannitol molecules are able to substantially inflict gastrointestinal distress including but not limited to the symptoms listed above.

[0019] In one aspect of any of the embodiments, provided herein is a composition or combination comprising, consisting of, or consisting essentially of at least one of:
[0020] a. At least one fructan-degrading enzyme;
[0021] b. At least one galactosidase;
[0022] c. At least one sorbitol-degrading enzyme;
[0023] d. At least one mannitol-degrading enzyme;
[0024] e. At least one glucose isomerase; and
[0025] f. At least one mannose isomerase.

[0026] In one aspect of any of the embodiments, provided herein is composition or combination comprising, consisting of, or consisting essentially of at least one of:
[0027] a. At least one fructan-degrading enzyme;
[0028] b. At least one galactosidase;
[0029] c. At least one sorbitol-degrading enzyme;
[0030] d. At least one mannitol-degrading enzyme; and
[0031] e. At least one glucose isomerase.

[0032] In some embodiments of any of the aspects, the composition or combination comprises least one, two, three, or four of:
[0033] a. At least one fructan-degrading enzyme;
[0034] b. At least one galactosidase;
[0035] c. At least one sorbitol-degrading enzyme; and
[0036] d. At least one mannitol-degrading enzyme.

[0037] In some embodiments of any of the aspects, the composition or combination comprises at least one fructan-degrading enzyme; and at least one galactosidase. In some embodiments of any of the aspects, the composition or combination comprises at least one fructan-degrading enzyme; at least one sorbitol-degrading enzyme; at least one mannitol-degrading enzyme; and at least one glucose isomerase.

[0038] In one aspect of any of the embodiments, provided herein is a composition or combination comprising, consisting of, or consisting essentially of:
[0039] a. At least one fructan-degrading enzyme;
[0040] b. At least one galactosidase;
[0041] c. At least one sorbitol-degrading enzyme;
[0042] d. At least one mannitol-degrading enzyme;
[0043] e. At least one glucose isomerase; and
[0044] f. At least one mannose isomerase.

[0045] In some embodiments of any of the aspects, the at least one fructan-degrading enzyme comprises an inulinase, e.g, a yeast inulinase. In some embodiments of any of the aspects, the inulinase is an exo-inulinase. In some embodiments of any of the aspects, the exo-inulinase is an exo-inulinase of, or is obtained from an Aspergillus or Kluyveromyces spp. In some embodiments of any of the aspects, the exo-inulinase is an exo-inulinase of, or is obtained from Aspergillus oryzae or Kluyveromyces marxianus. In some embodiments of any of the aspects, the exo-inulinase is an exo-inulinase of, or is obtained from Kluyveromyces marxianus CBS6014. In some embodiments of any of the aspects, the exo-inulinase has a sequence with at least 80% sequence identity to one of SEQ ID NOs: 3-7, 29-31, and 42-45. In some embodiments of any of the aspects, the inulinase is an endo-inulinase. In some embodiments of any of the aspects, the endo-inulinase is an endo-inulinase of, or is obtained from an Aspergillus spp. In some embodiments of any of the aspects, the endo-inulinase is an endo-inulinase of, or is obtained from Aspergillus niger. In some embodiments of any of the aspects, the endo-inulinase has a sequence with at least 80% sequence identity to one of SEQ ID NOs: 1-2. In some embodiments of any of the aspects, the composition or combination comprises both an exo-inulinase and an endo-inulinase.

[0046] In some embodiments of any of the aspects, the at least one fructan-degrading enzyme comprises an amyloglucosidase. In some embodiments of any of the aspects, the amyloglucosidase comprises a sequence with at least 80% sequence identity to one of SEQ ID NOs: 8-10.

[0047] In some embodiments of any of the aspects, the at least one galactosidase comprises an alpha-galactosidase. In some embodiments of any of the aspects, the alpha-galactosidase is an alpha-galactosidase of, or is obtained from an Aspergillus spp. In some embodiments of any of the aspects, the alpha-galactosidase is an alpha-galactosidase of, or is obtained from Aspergillus niger. In some embodiments of any of the aspects, the alpha-galactosidase comprises a sequence with at least 80% sequence identity to one of SEQ ID NOs: 11-14.

[0048] In some embodiments of any of the aspects, the at least one galactosidase comprises a beta-galactosidase. In some embodiments of any of the aspects, the beta-galactosidase is a beta-galactosidase of, or is obtained from an Aspergillus spp. In some embodiments of any of the aspects, the beta-galactosidase is a beta-galactosidase of, or is obtained from Aspergillus niger. In some embodiments of any of the aspects, the beta-galactosidase comprises a sequence with at least 80% sequence identity to SEQ ID NO: 15.

[0049] In some embodiments of any of the aspects, the at least one galactosidase comprises an alpha-galactosidase and a beta-galactosidase.

[0050] In some embodiments of any of the aspects, the at least one sorbitol-degrading enzyme comprises a sorbitol dehydrogenase. In some embodiments of any of the aspects, the sorbitol dehydrogenase is a mammalian sorbitol dehydrogenase. In some embodiments of any of the aspects, the sorbitol dehydrogenase is a sorbitol dehydrogenase of, or is obtained from a Ovis or Rattus species. In some embodiments of any of the aspects, the sorbitol dehydrogenase has a sequence with at least 80% sequence identity to one of SEQ ID NOs: 16-18. In some embodiments of any of the aspects, the at least one sorbitol-degrading enzyme comprises a sorbitol oxidase. In some embodiments of any of the aspects, the sorbitol oxidase is a yeast sorbitol oxidase. In some embodiments of any of the aspects, the sorbitol oxidase has a sequence with at least 80% sequence identity to SEQ ID NO: 19.

[0051] In some embodiments of any of the aspects, the at least one mannitol-degrading enzyme comprises a mannitol dehydrogenase. In some embodiments of any of the aspects, the mannitol dehydrogenase is a bacterial mannitol dehydrogenase. In some embodiments of any of the aspects, the mannitol dehydrogenase is a mannitol dehydrogenase of, or is obtained from a Pseudomonas, Escherichia, Leuconostoc, or Gluconobacter spp. In some embodiments of any of the aspects, the mannitol dehydrogenase is a mannitol dehydrogenase of, or is obtained from P. fluorescens, E. coli, L. mesenteroides, or G. oxydans. In some embodiments of any of the aspects, the mannitol dehydrogenase has a sequence with at least 80% sequence identity to one of SEQ ID NOs: 20-26. In some embodiments of any of the aspects, the at least one mannitol-degrading enzyme comprises a mannitol oxidase.

[0052] In some embodiments of any of the aspects, the glucose isomerase is a yeast glucose isomerase. In some embodiments of any of the aspects, the glucose isomerase is a glucose isomerase of, or is obtained from a Streptomyces spp. In some embodiments of any of the aspects, the glucose isomerase is a glucose isomerase of, or is obtained from S. murinus. In some embodiments of any of the aspects, the glucose isomerase has a sequence with at least 80% sequence identity to SEQ ID NO: 27.

[0053] In some embodiments of any of the aspects, the mannose isomerase is a bacterial mannose isomerase. In some embodiments of any of the aspects, the mannose isomerase is a mannose isomerase of, or is obtained from a Thermobifida spp. In some embodiments of any of the aspects, the mannose isomerase is a mannose isomerase of, or is obtained from T. fusca. In some embodiments of any of the aspects, the mannose isomerase has a sequence with at least 80% sequence identity to SEQ ID NO: 28.

[0054] In some embodiments of any of the aspects, the composition or combination further comprises one or more of: a cofactor; a metal ion; an antacid; an H2 antagonist; a proton pump inhibitor; a pepstatin protease inhibitor; or a protease inhibitor. In some embodiments of any of the aspects, the composition or combination is formulated as a food supplement. In some embodiments of any of the aspects, the composition or combination further comprises a carrier, e.g., a pharmaceutically acceptable carrier. In some embodiments of any of the aspects, the composition or combination is provided in a shelf-stable formulation. In some embodiments of any of the aspects, the composition or combination is formulated as a powder, a solution, a pill, a capsule, a concentrate, a tablet, a soft-gel, a thin-film, a liquid, and/or a syrup. In some embodiments of any of the aspects, the composition or combination is formulated with an enteric coating. In some embodiments of any of the aspects, the composition or combination is provided as a single composition. In some embodiments of any of the aspects, the composition or combination is provided as a combination of multiple compositions that can be mixed prior to administration or consumption, and/or administered or consumed separately.

[0055] In some embodiments of any of the aspects, the composition or combination does not comprise a live microbe. In some embodiments of any of the aspects, the composition or combination does not comprise a live yeast. In some embodiments of any of the aspects, the composition or combination does not comprise flour. In some embodiments of any of the aspects, the composition or combination does not comprise an invertase, a beta-fructofuranosidase, alpha-galactosidease, beta-glucanase, and/or pectinase. In some embodiments of any of the aspects, the composition or combination does further comprise 5-D-fructose dehydrogenase.

[0056] In one aspect of any of the embodiments, provided herein is a nucleic acid comprising a sequence encoding one or more of:
[0057] a. At least one fructan-degrading enzyme;
[0058] b. At least one galactosidase;
[0059] c. At least one sorbitol-degrading enzyme;
[0060] d. At least one mannitol-degrading enzyme;
[0061] e. At least one glucose isomerase; and
[0062] f. At least one mannose isomerase; and
at least one of:
[0063] g. an operably linked heterologous promoter; and
[0064] h. at least one codon optimized for expression in bacteria or yeast.
In one aspect of any of the embodiments, provided herein is a cell comprising the foregoing nucleic acid.

[0065] In one aspect of any of the embodiments, provided herein is a method of improving digestion, the method comprising consuming, or administering to a subject, the composition or combination described herein. In one aspect of any of the embodiments, provided herein is a method of treating a digestive condition, the method comprising administering to a subject, the composition or combination described herein. In one aspect of any of the embodiments, provided herein is a composition or combination as described herein for use in a method of treating a digestive condition in a subject.

[0066] In some embodiments of any of the aspects, administering the composition to a subject comprises directing the subject to consume the composition. In some embodiments of any of the aspects, consumption or administration occurs within 30 minutes of consumption of a meal, or consumption of other food or drink, e.g., within 30 minutes prior, within 20 minutes prior, within 10 minutes prior, or at at least partially during consumption. In some embodiments of any of the aspects, the digestive condition is Irritable Bowel Syndrome (IBS); Inflammatory Bowel Disease (IBD); Non-celiac gluten sensitivity; small intestinal bacterial overgrowth (SIBO); small intestinal fungal overgrowth (SIFO); and/or allium intolerance. In some embodiments of any of the aspects, the subject is sensitive to one or more FODMAPs. In some embodiments of any of the aspects, bloating, gas, abdominal pain, abdominal discomfort, nausea, diarrhea, and/or constipation is decreased.

### BRIEF DESCRIPTION OF THE DRAWINGS

[0067] FIG. 1 depicts a graph of weighted flatulence scores following fructan consumption with or without exo-inulinase.

[0068] FIG. 2 depicts graphs of diarrhea episodes and weighted flatulence scores following fructan consumption with or without exo-inulinase.

### DETAILED DESCRIPTION

[0069] As described above, the compositions and methods provided herein provide improved digestion of one or more FODMAPs. In one aspect of any of the embodiments, described herein is a composition or combination comprising, consisting of, or consisting essentially of at least one of: a) at least one fructan-degrading enzyme; b) at least one galactosidase, c) at least one sorbitol-degrading enzyme; d) at least one mannitol-degrading enzyme; e) at least one glucose isomerase; f) at least one mannose isomerase, and g) at least one lactase. Any one of the foregoing element options (e.g., a-g), and combinations thereof (e.g., 2, 3, 4, 5, 6, or 7) of the foregoing are specifically contemplated herein. In addition, 2 or more species of any of the individual element options can be used or present in the same composition or combination. For example, 2 or more different fructan-degrading enzymes can be used or present in the same composition or combination.

[0070] In one aspect of any of the embodiments, described herein is a composition or combination comprising, consisting of, or consisting essentially of at least one of: at least one fructan-degrading enzyme; at least one galactosidase; at least one sorbitol-degrading enzyme; at least one mannitol-degrading enzyme; and at least one glucose isomerase. In one aspect of any of the embodiments, described herein is a composition or combination comprising, consisting of, or consisting essentially of at least one of: at least one fructan-degrading enzyme; at least one galactosidase; at least one sorbitol-degrading enzyme; and at least one mannitol-degrading enzyme. In one aspect of any of the embodiments, described herein is a composition or combination comprising, consisting of, or consisting essentially of at least two of: at least one fructan-degrading enzyme; at least one galactosidase; at least one sorbitol-degrading enzyme; and at least one mannitol-degrading enzyme. In one aspect of any of the embodiments, described herein is a composition or combination comprising, consisting of, or consisting essentially of at least three of: at least one fructan-degrading enzyme; at least one galactosidase; at least one sorbitol-degrading enzyme; and at least one mannitol-degrading enzyme. In one aspect of any of the embodiments, described herein is a composition or combination comprising, consisting of, or consisting essentially of at least one fructan-degrading enzyme; at least one galactosidase; at least one sorbitol-degrading enzyme; and at least one mannitol-degrading enzyme. In one aspect of any of the embodiments, described herein is a composition or combination comprising, consisting of, or consisting essentially of at least one fructan-degrading enzyme; at least one galactosidase; at least one sorbitol-degrading enzyme; at least one mannitol-degrading enzyme; and at least one glucose isomerase. In one aspect of any of the embodiments, described herein is a composition or combination comprising, consisting of, or consisting essentially of at least one fructan-degrading enzyme; at least one galactosidase; at least one sorbitol-degrading enzyme; at least one mannitol-degrading enzyme; at least one glucose isomerase; and at least one mannose isomerase. In some embodiments of any of the aspects, the composition or combination further comprises at least one lactase.

[0071] In one aspect of any of the embodiments, described herein is a composition or combination comprising, consisting of, or consisting essentially of at least one fructan-degrading enzyme and at least one galactosidase. In one aspect of any of the embodiments, described herein is a composition or combination comprising, consisting of, or consisting essentially of at least one fructan-degrading enzyme, at least one galactosidase, and at least one lactase.

[0072] In one aspect of any of the embodiments, described herein is a composition or combination comprising, consisting of, or consisting essentially of at least one fructan-degrading enzyme and at least one galactosidase and not comprising a pectinase. In one aspect of any of the embodiments, described herein is a composition or combination comprising, consisting of, or consisting essentially of at least one fructan-degrading enzyme and at least one lactase and not comprising a pectinase. In one aspect of any of the embodiments, described herein is a composition or combination comprising, consisting of, or consisting essentially of at least one fructan-degrading enzyme, at least one galactosidase, and at least one lactase; and not comprising a pectinase. In some embodiments of any of the aspects, the composition or combination does not comprise a glucose isomerase.

[0073] In one aspect of any of the embodiments, described herein is a composition or combination comprising, consisting of, or consisting essentially of at least one fructan-degrading enzyme and not comprising a galactosidase. In one aspect of any of the embodiments, described herein is a composition or combination comprising, consisting of, or consisting essentially of at least one fructan-degrading enzyme and not comprising a lactase. In one aspect of any of the embodiments, described herein is a composition or combination comprising, consisting of, or consisting essentially of at least one fructan-degrading enzyme and not comprising a galactosidease or a lactase. In one aspect of any of the embodiments, described herein is a composition or combination comprising, consisting of, or consisting essentially of at least one fructan-degrading enzyme and not comprising a pectinase. In some embodiments of any of the aspects, the composition or combination does not comprise a glucose isomerase.

[0074] As used herein, “fructan-degrading enzyme” refers to any enzyme that catabolizes fructan or a catabolic product of fructan. Fructans are a group of polymers comprising fructose units. Fructans include inulins, and levans. The linkage position of the fructose residues determines the type of the fructan. Individual fructans can comprise additional sugars, including by way of non-limiting example, glucose and sucrose.

[0075] In some embodiments of any of the aspects, the fructan is inulin. Inulins are polymers comprising fructose units linked by β(2,1) glycosidic bonds and can further comprise a chain-terminating glucose. Inulins can be linear or branched.

[0076] Fructan catabolism can comprise:
[0077] 1) endohydrolysis of (2->1)-beta-D-fructosidic linkages in inulin by inulinase (e.g., endo-inulinase, E.C. 3.2.1.7) or endo-levanases;
[0078] 2) cleavage of terminal glucose-fructose or fructose-fructose O-C bonds in a fructan polymer by exo-inulinase (also known as beta-fructosidase, fructan beta-fructosidase (e.g., E.C. 3.2.1.80), beta- fructofuranosidase, and invertase (e.g., E.C. 3.2.1.26), see, e.g., SUC2 of S. cerevisiae, NCBI ID: 854644) or exo-levanases to release one fructose or glucose molecule from the fructan; and/or
[0079] 2) hydrolysis of a terminal glucose from fructan by an amyloglucosidase (AMG) that hydrolyzes an alpha-glycosidic linkage (see, e.g., CAS 9032-08-08, available commercially from Millipore Sigma (St. Louis, MO) under Cat. No. A7420).
Fructan-degrading enzymes are known in the art as described below herein.

[0080] In some embodiments of any of the aspects, the at least one fructan-degrading enzyme comprises, consists of, or consists essentially of one or more inulinases. Inulinases are known in the art and can be, e.g., a yeast inulinase. Sequences of inulinases, e.g, yeast inulinases, can be readily obtained from publicly available databases, e.g., the NCBI and/or UNIPROT databases or obtained commercially. In some embodiments of any of the aspects, the at least one fructan-degrading enzyme comprises, consists of, or consists essentially of one or more levanases. Levanases are known in the art and can be, e.g., a bacterial levanase. Sequences of levanases can be readily obtained from publicly available databases, e.g., the NCBI and/or UNIPROT databases or obtained commercially.

[0081] In some embodiments of any of the aspects, the at least one fructan-degrading enzyme comprises, consists of, or consists essentially of one or more endo-inulinases. In some embodiments of any of the aspects, the at least one fructan-degrading enzyme comprises, consists of, or consists essentially of one or more exo-inulinases. In some embodiments of any of the aspects, the at least one fructan-degrading enzyme comprises, consists of, or consists essentially of one or more amyloglucosidases.

[0082] As used herein “endo-inulinase” refers to an enzyme that performs endohydrolysis of the fructose-fructose linkages of inulin. The sequences of a number of endo-inulinases are known in the art and are readily obtained, e.g., from keyword or homology searches of publicly available databases, e.g., the NCBI or UNIPROT databases. Endo-inulinases are produced by a number of species. In some embodiments of any of the aspects, the endo-inulinase is a yeast endo-inulinase.

[0083] In some embodiments of any of the aspects, the endo-inulinase is an endo-inulinase obtained or purified from an Aspergillus or Penicillium species, or having the sequence of an endo-inulinase of an Aspergillus or Penicillium species. In some embodiments of any of the aspects, the endo-inulinase is an endo-inulinase obtained or purified from an Aspergillus species, or having the sequence of an endo-inulinase of an Aspergillus species. In some embodiments of any of the aspects, the endo-inulinase is an endo-inulinase obtained or purified from Aspergillus niger, or having the sequence of an endo-inulinase of Aspergillus niger. These sequences are known in the art. For example, endo-inulinase sequences are provided in Table 1 for Aspergillus niger and a Penicillium spp. In some embodiments of any of the aspects, the endo-inulinase has at least 80%, at least 85%, at least 90%, at least 95%, at least 98%, or greater sequence identity with one or more of SEQ ID NOs: 1-2. In some embodiments of any of the aspects, the endo-inulinase has at least 95% sequence identity with one or more of SEQ ID NOs: 1-2 and retains the wild-type activity of one or more of SEQ ID NOs: 1-2. Sequences for orthologs found in additional species are readily obtained, e.g., by clicking on the ortholog option for any of the NCBI gene entries in Table 1 or conducting a BLAST search using one of the sequences of Table 1.

TABLE 1

Exemplary endo-inulinases

| Species | Database ID/Accession No. | SEQ ID NO: |
|---|---|---|
| Aspergillus niger | ABB59681.1 | 1 |
| Penicillium sp. TN-88 | BAB19132.1 | 2 |

[0084] In some embodiments of any of the aspects, the at least one fructan-degrading enzyme comprises, consists of, or consists essentially of one or more endo-levanases. As used herein “endo-levanase” refers to an enzyme that performs endohydrolysis of the 2->6 beta-D fructose-fructose linkages of levans. The sequences of a number of endo-levanases are known in the art and are readily obtained, e.g., from keyword or homology searches of publicly available databases, e.g., the NCBI or UNIPROT databases. Endo-leavanase are produced by a number of species. In some embodiments of any of the aspects, the endo-inulinase is a bacterial endo-levanase.

[0085] In some embodiments of any of the aspects, the endo-levanase is an endo-leavanase obtained or purified from a Bacillus species, or having the sequence of an endo-levanase of a Bacillus species. In some embodiments of any of the aspects, the endo-levanase is an endo-levanase obtained or purified from a Bacillus species, or having the sequence of an endo-levanase of a Bacillus species. In some embodiments of any of the aspects, the endo-levanase is an endo-levanase obtained or purified from Bacillus spizizenii, or having the sequence of an endo-levanase of Bacillus spizizenii. These sequences are known in the art. For example, endo-levanases sequences are provided in Table 14 for Bacillus spizizenii. In some embodiments of any of the aspects, the endo-levanase has at least 80%, at least 85%, at least 90%, at least 95%, at least 98%, or greater sequence identity with SEQ ID NO: 49. In some embodiments of any of the aspects, the endo-levanase has at least 95% sequence identity with SEQ ID NO: 49 and retains the wild-type activity of SEQ ID NO: 49. Sequences for orthologs found in additional species are readily obtained, e.g., by clicking on the ortholog option for any of the NCBI gene entries in Table 14 or conducting a BLAST search using one of the sequences of Table 14.

TABLE 14

Exemplary endo-levanases

| Species | Database ID/Accession No. | SEQ ID NO: |
|---|---|---|
| Bacillus spizizenii | GenBank: SPU08719.1 | 49 |

[0086] As used herein “exo-inulinase” refers to an enzyme that performs hydrolysis of the terminal fructose-fructose linkages and/or glucose-fructose linkages of inulin. The sequences of a number of exo-inulinases are known in the art and are readily obtained, e.g., from keyword or homology searches of publicly available databases, e.g., the NCBI or UNIPROT databases. Exo-inulinases are produced by a number of species. In some embodiments of any of the aspects, the exo-inulinase is a yeast exo-inulinase.

[0087] In some embodiments of any of the aspects, the at least one fructan-degrading enzyme comprises, consists of, or consists essentially of one or more exo-inulinases which does not comprise endo-inulinase activity. In some embodiments of any of the aspects, the endo-inulinase activity is activity according to EC 3.2.1.7. In some embodiments of any of the aspects, the at least one fructan-degrading enzyme comprises, consists of, or consists essentially of one or more exo-inulinases which also comprise fructosyltransferase activity. In some embodiments of any of the aspects, the at least one fructan-degrading enzyme comprises, consists of, or consists essentially of one or more exo-inulinases which also comprise beta-fructofuranosidase activity. In some embodiments of any of the aspects, the at least one fructan-degrading enzyme comprises, consists of, or consists essentially of one or more exo-inulinases which does not comprise endo-inulinase activity and does comprise fructosyltransferase and/or beta-fructo-furanosidase activity.

[0088] In some embodiments of any of the aspects, the exo-inulinase is an exo-inulinase obtained or purified from an Aspergillus, Lactobacillus, Paenibacillus, Penicillium, Geobacillus, or Kluyveromyces spp, or having the sequence of an exo-inulinase of an Aspergillus, Lactobacillus, Paenibacillus, Penicillium, Geobacillus, or Kluyveromyces spp. In some embodiments of any of the aspects, the exo-inulinase is an exo-inulinase obtained or purified from an Aspergillus or Kluyveromyces spp, or having the sequence of an exo-inulinase of an Aspergillus or Kluyveromyces spp. In some embodiments of any of the aspects, the exo-inulinase is an exo-inulinase obtained or purified from Aspergillus niger, Aspergillus oryzae, Aspergillus luchuensis, Paenibacillus polymyxa, Penicillium citrinum, Geobacillus stearothermophilus, or Kluyveromcyes maxianus (e.g., DMKU3-1042 or CBS6014, see, e.g., US 2020/0205425), or having the sequence of an exo-inulinase of Aspergillus niger, Aspergillus oryzae, Aspergillus luchuensis, Paenibacillus polymyxa, Penicillium citrinum, Geobacillus stearothermophilus, or Kluyveromcyes maxianus. In some embodiments of any of the aspects, the exo-inulinase is an exo-inulinase obtained or purified from Aspergillus niger, Aspergillus oryzae, Aspergillus luchuensis, or Kluyveromcyes maxianus (e.g., DMKU3-1042 or CBS6014, see, e.g., US 2020/0205425), or having the sequence of an exo-inulinase of Aspergillus niger, Aspergillus oryzae, Aspergillus luchuensis, or Kluyveromcyes maxianus. In some embodiments of any of the aspects, the exo-inulinase is an exo-inulinase obtained or purified from Aspergillus oryzae, Aspergillus luchuensis, Paenibacillus polymyxa, Penicillium citrinum, Geobacillus stearothermophilus, or Kluyveromcyes maxianus (e.g., DMKU3-1042 or CBS6014, see, e.g., US 2020/0205425), or having the sequence of an exo-inulinase of Aspergillus oryzae, Aspergillus luchuensis, Paenibacillus polymyxa, Penicillium citrinum, Geobacillus stearothermophilus, or Kluyveromcyes maxianus. In some embodiments of any of the aspects, the exo-inulinase is an exo-inulinase obtained or purified from Aspergillus oryzae, Aspergillus luchuensis, or Kluyveromcyes maxianus (e.g., DMKU3-1042 or CBS6014, see, e.g., US 2020/0205425), or having the sequence of an exo-inulinase of Aspergillus oryzae, Aspergillus luchuensis, or Kluyveromcyes maxianus. In some embodiments of any of the aspects, the exo-inulinase is an exo-inulinase obtained or purified from Aspergillus oryzae or having the sequence of an exo-inulinase of Aspergillus oryzae. These sequences are known in the art. For example, exo-inulinase sequences are provided in Table 2 for, e.g., Aspergillus niger, Aspergillus oryzae, Aspergillus luchuensis, and Kluyveromcyes maxianus. In some embodiments of any of the aspects, the exo-inulinase has at least 80%, at least 85%, at least 90%, at least 95%, at least 98%, or greater sequence identity with one or more of SEQ ID NOs: 3-7, 29-31, and 42-48. In some embodiments of any of the aspects, the exo-inulinase has at least 95% sequence identity with one or more of SEQ ID NOs: 3-7, 29-31, and 42-48 and retains the wild-type activity of one or more of SEQ ID NOs: 3-7, 29-31, and 42-48. Sequences for orthologs found in additional species are readily obtained, e.g., by clicking on the ortholog option for any of the NCBI gene entries in Table 2 or conducting a BLAST search using one of the sequences of Table 2. Exemplary embodiments of commercially available exo-inulinases can include Catalog No. NATE-1245 from Creative Enzymes (Shirley, NY) and Catalog No. E-EXOIAN from Megazyme (Bray, Ireland). Further exemplary exo-inulinases are described in Goh et al (2007) Appl. Environ. Microbiol. 73 (18) 5716-5724; Müller, M. and Seyfarth, W. (1997). New Phytol. 136, 89-96; Paludan-Müller, et al. (2002). System. Appl. Microbiol. 25, 13-20; U.S. Pat. Publication US 2019/0174773; and International Patent Publication WO 2010/097416; each of which is incorporated by reference herein in its entirety.

[0089] In some embodiments of any of the aspects, the exo-inulinase has at least 80%, at least 85%, at least 90%, at least 95%, at least 98%, or 100% sequence identity with SEQ ID NO: 3. In some embodiments of any of the aspects, the exo-inulinase has at least 95% sequence identity with SEQ ID NO: 3 and retains the wild-type activity of SEQ ID NO: 3. In some embodiments of any of the aspects, the exo-inulinase has at least 80%, at least 85%, at least 90%, at least 95%, at least 98%, or 100% sequence identity with SEQ ID NO: 4. In some embodiments of any of the aspects, the exo-inulinase has at least 95% sequence identity with SEQ ID NO: 4 and retains the wild-type activity of SEQ ID NO: 4. In some embodiments of any of the aspects, the exo-inulinase has at least 80%, at least 85%, at least 90%, at least 95%, at least 98%, or 100% sequence identity with SEQ ID NO: 5. In some embodiments of any of the aspects, the exo-inulinase has at least 95% sequence identity with SEQ ID NO: 5 and retains the wild-type activity of SEQ ID NO: 5. In some embodiments of any of the aspects, the exo-inulinase has at least 80%, at least 85%, at least 90%, at least 95%, at least 98%, or 100% sequence identity with SEQ ID NO: 6. In some embodiments of any of the aspects, the exo-inulinase has at least 95% sequence identity with SEQ ID NO: 6 and retains the wild-type activity of SEQ ID NO: 6. In some embodiments of any of the aspects, the exo-inulinase has at least 80%, at least 85%, at least 90%, at least 95%, at least 98%, or 100% sequence identity with SEQ ID NO: 7. In some embodiments of any of the aspects, the exo-inulinase has at least 95% sequence identity with SEQ ID NO: 7 and retains the wild-type activity of SEQ ID NO: 7. In some embodiments of any of the aspects, the exo-inulinase has at least 80%, at least 85%, at least 90%, at least 95%, at least 98%, or 100% sequence identity with SEQ ID NO: 29. In some embodiments of any of the aspects, the exo-inulinase has at least 95% sequence identity with SEQ ID NO: 29 and retains the wild-type activity of SEQ ID NO: 29. In some embodiments of any of the aspects, the exo-inulinase has at least 80%, at least 85%, at least 90%, at least 95%, at least 98%, or 100% sequence identity with SEQ ID NO: 30. In some embodiments of any of the aspects, the exo-inulinase has at least 95% sequence identity with SEQ ID NO: 30 and retains the wild-type activity of SEQ ID NO: 30. In some embodiments of any of the aspects, the exo-inulinase has at least 80%, at least 85%, at least 90%, at least 95%, at least 98%, or 100% sequence identity with SEQ ID NO: 31. In some embodiments of any of the aspects, the exo-inulinase has at least 95% sequence identity with SEQ ID NO: 31 and retains the wild-type activity of SEQ ID NO: 31. In some embodiments of any of the aspects, the exo-inulinase has at least 80%, at least 85%, at least 90%, at least 95%, at least 98%, or 100% sequence identity with SEQ ID NO: 42. In some embodiments of any of the aspects, the exo-inulinase has at least 95% sequence identity with SEQ ID NO: 42 and retains the wild-type activity of SEQ ID NO: 42. In some embodiments of any of the aspects, the exo-inulinase has at least 80%, at least 85%, at least 90%, at least 95%, at least 98%, or 100% sequence identity with SEQ ID NO: 43. In some embodiments of any of the aspects, the exo-inulinase has at least 95% sequence identity with SEQ ID NO: 43 and retains the wild-type activity of SEQ ID NO: 43. In some embodiments of any of the aspects, the exo-inulinase has at least 80%, at least 85%, at least 90%, at least 95%, at least 98%, or 100% sequence identity with SEQ ID NO: 44. In some embodiments of any of the aspects, the exo-inulinase has at least 95% sequence identity with SEQ ID NO: 44 and retains the wild-type activity of SEQ ID NO: 44. In some embodiments of any of the aspects, the exo-inulinase has at least 80%, at least 85%, at least 90%, at least 95%, at least 98%, or 100% sequence identity with SEQ ID NO: 45. In some embodiments of any of the aspects, the exo-inulinase has at least 95% sequence identity with SEQ ID NO: 45 and retains the wild-type activity of SEQ ID NO: 45. In some embodiments of any of the aspects, the exo-inulinase has at least 80%, at least 85%, at least 90%, at least 95%, at least 98%, or 100% sequence identity with SEQ ID NO: 46. In some embodiments of any of the aspects, the exo-inulinase has at least 95% sequence identity with SEQ ID NO: 46 and retains the wild-type activity of SEQ ID NO: 46. In some embodiments of any of the aspects, the exo-inulinase has at least 80%, at least 85%, at least 90%, at least 95%, at least 98%, or 100% sequence identity with SEQ ID NO: 47. In some embodiments of any of the aspects, the exo-inulinase has at least 95% sequence identity with SEQ ID NO: 47 and retains the wild-type activity of SEQ ID NO: 47. In some embodiments of any of the aspects, the exo-inulinase has at least 80%, at least 85%, at least 90%, at least 95%, at least 98%, or 100% sequence identity with SEQ ID NO: 48. In some embodiments of any of the aspects, the exo-inulinase has at least 95% sequence identity with SEQ ID NO: 48 and retains the wild-type activity of SEQ ID NO: 48.

TABLE 2

Exemplary exo-inulinases

| Species | Database ID/Accession No. | SEQ ID NO: |
|---|---|---|
| Aspergillus oryzae | ABY49829 | 3 |
| Aspergillus niger | CAK41278 | 4 |
| Aspergillus oryzae | BAE61799 | 5 |
| Kluyveromyces marxianus MMKU3-1042 | XP_022674031 | 6 |
| Lactobacillus crispatus (DSM 29598) (see, e.g., U.S. Pat. Publication 2019/0174773) | | 7 |
| Kluyveromyces marxianus | AF178979.1 | 29 |
| Aspergillus luchuensis | GAT18742.1 | 30 |
| Aspergillus luchuensis | GAA87698.1 | 31 |
| synthetic construct derived from Talaromyces purpureogenus, optimized for expression in Eschericia coli | AVH78393.1 | 42 |
| Aspergillus oryzae | AGI61107.1 | 43 |
| Aspergillus oryzae | AVJ46872.1 | 44 |
| Aspergillus niger | AHC54391.1 | 45 |
| Paenibacillus polymyxa | Genbank: AAL82575.1 | 46 |
| Penicillium citrinum | GenBank: AIY26830.1 | 47 |
| Geobacillus stearothermophilus | GenBank: BAC45010.1 | 48 |

[0090] As used herein “exo-levanase” refers to an enzyme that performs hydrolysis of the terminal 2->6 beta-D fructose-fructose linkages of levans. The sequences of a number of exo-levanases are known in the art and are readily obtained, e.g., from keyword or homology searches of publicly available databases, e.g., the NCBI or UNIPROT databases. Exo-levanases are produced by a number of species. In some embodiments of any of the aspects, the exo-levanase is a bacterial exo-levanase.

[0091] In some embodiments of any of the aspects, the at least one fructan-degrading enzyme comprises, consists of, or consists essentially of one or more exo-levanase which does not comprise endo-levanase activity. In some embodiments of any of the aspects, the at least one fructan-degrading enzyme comprises, consists of, or consists essentially of one or more exo-levanase which does not comprise endo-levanase activity or endo-inulinase activity. In some embodiments of any of the aspects, the at least one fructan-degrading enzyme comprises, consists of, or consists essentially of one or more exo-levanases which also comprise fructosyltransferase activity. In some embodiments of any of the aspects, the at least one fructan-degrading enzyme comprises, consists of, or consists essentially of one or more exo-levanases which also comprise beta-fructofuranosidase activity. In some embodiments of any of the aspects, the at least one fructan-degrading enzyme comprises, consists of, or consists essentially of one or more exo-levanase which does not comprise endo-inulinase activity, does not comprise endo-levanases activity, and does comprise fructosyltransferase and/or beta-fructo-furanosidase activity.

[0092] In some embodiments of any of the aspects, the exo-levanase is an exo-levanase obtained or purified from a Gluconacetobacter spp, or having the sequence of an exo-levanase of a Gluconacetobacter spp. In some embodiments of any of the aspects, the exo-levanase is an exo-levanase obtained or purified from Gluconacetobacter johannae, or having the sequence of an exo-levanase of Gluconacetobacter johannae. These sequences are known in the art. For example, exo-levanse sequences are provided in Table 15 for, e.g., Gluconacetobacter johannae. In some embodiments of any of the aspects, the exo-levanase has at least 80%, at least 85%, at least 90%, at least 95%, at least 98%, or greater sequence identity with SEQ ID NO: 50. In some embodiments of any of the aspects, the exo-levanase has at least 95% sequence identity with SEQ ID NO: 50 and retains the wild-type activity of SEQ ID NO: 50. Sequences for orthologs found in additional species are readily obtained, e.g., by clicking on the ortholog option for any of the NCBI gene entries in Table 15 or conducting a BLAST search using one of the sequences of Table 15.

TABLE 15

Exemplary exo-levanase

| Species | Database ID/Accession No. | SEQ ID NO: |
|---|---|---|
| Gluconacetobacter johannae | QEP49755.1 | 50 |

[0093] In some embodiments of any of the aspects, the at least one fructan-degrading enzyme comprises, consists of, or consists essentially of one or more of: at least one exo-inulinase, at least one exo-levanase; at least one endo-levanase, and at least one endo-inulinase. In some embodiments of any of the aspects, the at least one fructan-degrading enzyme comprises, consists of, or consists essentially of: at least one exo-inulinase, at least one exo-levanase; at least one endo-levanase, and at least one endo-inulinase. In some embodiments of any of the aspects, the at least one fructan-degrading enzyme comprises, consists of, or consists essentially of: at least one endo-levanase and at least one endo-inulinase.

[0094] In some embodiments of any of the aspects, the at least one fructan-degrading enzyme comprises, consists of, or consists essentially of both at least one exo-inulinase and at least one endo-inulinase. In some embodiments of any of the aspects, the composition or combination does not comprise an inulinase obtained or purified from Aspergillus niger, or having the sequence of an inulinase of Aspergillus niger. In some embodiments of any of the aspects, the composition or combination does not comprise an exo-inulinase obtained or purified from Aspergillus niger, or having the sequence of an exo-inulinase of Aspergillus niger. In some embodiments of any of the aspects, the composition or combination does not comprise an endo-inulinase obtained or purified from Aspergillus niger, or having the sequence of an exo-inulinase of Aspergillus niger.

[0095] As used herein “amyloglucosidase” refers to an enzyme that performs hydrolysis of an alpha-glycosidic linkage to release a terminal glucose. The sequences of a number of amyloglucosidases are known in the art and are readily obtained, e.g., from keyword or homology searches of publicly available databases, e.g., the NCBI or UNIPROT databases. Amyloglucosidases are produced by a number of species. In some embodiments of any of the aspects, the amyloglucosidase is a yeast amyloglucosidase.

[0096] In some embodiments of any of the aspects, the amyloglucosidase is an amyloglucosidase obtained or purified from an Aspergillus or Saccharomyces spp, or having the sequence of an amyloglucosidase of an Aspergillus or Saccharomyces spp. In some embodiments of any of the aspects, the amyloglucosidase is an amyloglucosidase obtained or purified from Aspergillus niger, or having the sequence of an amyloglucosidase of Aspergillus niger. These sequences are known in the art. For example, amyloglucosidase sequences are provided in Table 3 for Aspergillus fumigatus, Saccharomyces cerevisiae, and Aspergillus niger. In some embodiments of any of the aspects, the amyloglucosidase has at least 80%, at least 85%, at least 90%, at least 95%, at least 98%, or greater sequence identity with one or more of SEQ ID NOs: 8-10. In some embodiments of any of the aspects, the amyloglucosidase has at least 95% sequence identity with one or more of SEQ ID NOs: 8-10 and retains the wild-type activity of one or more of SEQ ID NOs: 8-10. Sequences for orthologs found in additional species are readily obtained, e.g., by clicking on the ortholog option for any of the NCBI gene entries in Table 3 or conducting a BLAST search using one of the sequences of Table 3.

TABLE 3

Exemplary amyloglucosidase

| Species | Database ID/Accession No. | SEQ ID NO: |
|---|---|---|
| Aspergillus fumigatus Af293 | 3507868 | 8 |
| Saccharomyces cerevisiae S288C | 856314 | 9 |
| Aspergillus niger | GAQ33831 | 10 |

[0097] In some embodiments of any of the aspects, the at least one fructan-degrading enzyme comprises, consists of, or consists essentially of at least one exo-inulinase, at least one endo-inulinase, and at least one amyloglucosidase. In some embodiments of any of the aspects, the at least one fructan-degrading enzyme comprises, consists of, or consists essentially of at least one exo-inulinase and at least one amyloglucosidase. In some embodiments of any of the aspects, the at least one fructan-degrading enzyme comprises, consists of, or consists essentially of at least one endo-inulinase and at least one amyloglucosidase.

[0098] In some embodiments of any of the aspects, the at least one fructan-degrading enzyme comprises, consists of, or consists essentially of a) at least one exo-inulinase and/or exo-levanase, b) at least one endo-inulinase and/or exo-levanase, and c) at least one amyloglucosidase. In some embodiments of any of the aspects, the at least one fructan-degrading enzyme comprises, consists of, or consists essentially of a) at least one exo-inulinase and/or exo-levanase; and b) at least one amyloglucosidase. In some embodiments of any of the aspects, the at least one fructan-degrading enzyme comprises, consists of, or consists essentially of a) at least one endo-inulinase and/or endo-levanase, and b) at least one amyloglucosidase.

[0099] In some embodiments of any of the aspects, the at least one fructan-degrading enzyme does not comprise an amyloglucosidase. In some embodiments of any of the aspects, the at least one fructan-degrading enzyme does not comprise an enzyme with amyloglucosidase activity. In some embodiments of any of the aspects, the composition or combination provided herein does not comprise an amyloglucosidase. In some embodiments of any of the aspects, the composition or combination provided herein does not comprise an enzyme with amyloglucosidase activity. In some embodiments of any of the aspects, the composition or combination provided herein does not comprise an exogenous amyloglucosidase, e.g., an amyloglucosidase that was not present or provided as part of the biological material of a composition or combination element such as a yeast or a food.

[0100] In some embodiments of any of the aspects, the at least one fructan-degrading enzyme does not comprise an endo-levanase or an enzyme with endo-levanase activity. In some embodiments of any of the aspects, the composition or combination does not comprise an endo-levanase or an enzyme with endo-levanase activity. In some embodiments of any of the aspects, the at least one fructan-degrading enzyme does not comprise an exo-levanase or an enzyme with exo-levanase activity. In some embodiments of any of the aspects, the composition or combination does not comprise an exo-levanase or an enzyme with exo-levanase activity. In some embodiments of any of the aspects, the at least one fructan-degrading enzyme does not comprise an exo-levanase, an endo-levanase, or an enzyme with either endo- or exo-levanase activity. In some embodiments of any of the aspects, the composition or combination does not comprise an exo-levanase, an endo-levanase, or an enzyme with either endo- or exo-levanase activity.

[0101] In some embodiments of any of the aspects, the inulinase has at least 80%, at least 85%, at least 90%, at least 95%, at least 98%, or 100% sequence identity with any one of SEQ ID NOs: 305-799. In some embodiments of any of the aspects, the inulinase has at least 95% sequence identity with any one of SEQ ID NOs: 305-799. In some embodiments of any of the aspects, the inulinase has at at least 95% sequence identity with any one of SEQ ID NOs: 305-799 and retains the wild-type activity of the reference sequence selected from SEQ ID NOs: 305-799. In some embodiments of any of the aspects, the inulinase has the sequence of any one of SEQ ID NOs: 305-799.

[0102] Galactosidases include alpha-galactosidases and beta-galactosidases. In some embodiments of any of the aspects, the at least one galactosidase comprises, consists of, or consists essentially of at least one alpha-galactosidase and at least one beta-galactosidase. In some embodiments of any of the aspects, the at least one galactosidase comprises, consists of, or consists essentially of an alpha-galactosidase. In some embodiments of any of the aspects, the at least one galactosidase comprises, consists of, or consists essentially of a beta-galactosidase.

[0103] As used herein, “alpha-galactosidase” refers to an enzyme that hydrolyses terminal alpha-galactosyl moieties from oligosaccharides, glycolipids, and/or glycoproteins. The sequences of a number of alpha-galactosidases are known in the art and are readily obtained, e.g., from keyword or homology searches of publicly available databases, e.g., the NCBI or UNIPROT databases. Alpha-galactosidases are produced by a number of species. In some embodiments of any of the aspects, the alpha-galactosidase is a yeast alpha-galactosidase.

[0104] In some embodiments of any of the aspects, the alpha-galactosidase is an alpha-galactosidase obtained or purified from an Aspergillus species, or having the sequence of an alpha-galactosidase of an Aspergillus species. These sequences are known in the art. For example, alpha-galactosidase sequences are provided in Table 4 for Aspergillus niger. In some embodiments of any of the aspects, the alpha-galactosidase has at least 80%, at least 85%, at least 90%, at least 95%, at least 98%, or greater sequence identity with one or more of SEQ ID NOs: 11-14. In some embodiments of any of the aspects, the alpha-galactosidase has at least 95% sequence identity with one or more of SEQ ID NOs: 11-14 and retains the wild-type activity of one or more of SEQ ID NOs: 11-14. Sequences for orthologs found in additional species are readily obtained, e.g., by clicking on the ortholog option for any of the NCBI gene entries in Table 4 or conducting a BLAST search using one of the sequences of Table 4.

TABLE 4

Exemplary alpha-galactosidases

| Species | Database ID/Accession No. | SEQ ID NO: |
|---|---|---|
| Aspergillus niger CBS 101883 | 37101527 | 11 |
| Aspergillus niger CBS 101883 | 37099996 | 12 |
| Aspergillus niger | CAK44692 | 13 |
| Aspergillus niger (see, e.g., U.S. Pat. 6,197,566) | | 14 |

[0105] As used herein, “beta-galactosidase” refers to an enzyme that hydrolyses terminal beta-galactosyl moieties from oligosaccharides, glycolipids, and/or glycoproteins, most notably from lactose. The sequences of a number of beta-galactosidases are known in the art and are readily obtained, e.g., from keyword or homology searches of publicly available databases, e.g., the NCBI or UNIPROT databases. Beta-galactosidases are produced by a number of species. In some embodiments of any of the aspects, the beta-galactosidase is a yeast beta-galactosidase.

[0106] In some embodiments of any of the aspects, the beta-galactosidase is a beta-galactosidase obtained or purified from an Aspergillus species, or having the sequence of a beta-galactosidase of an Aspergillus species. In some embodiments of any of the aspects, the beta-galactosidase is a beta-galactosidase obtained or purified from Aspergillus niger, or having the sequence of a beta-galactosidase of Aspergillus niger. These sequences are known in the art. For example, an exemplary beta-galactosidase sequence is provided in Table 5 for Aspergillus niger. In some embodiments of any of the aspects, the beta-galactosidase has at least 80%, at least 85%, at least 90%, at least 95%, at least 98%, or greater sequence identity with SEQ ID NO: 15. In some embodiments of any of the aspects, the beta-galactosidase has at least 95% sequence identity with SEQ ID NO: 15 and retains the wild-type activity of SEQ ID NO: 15. Sequences for orthologs found in additional species are readily obtained, e.g., by clicking on the ortholog option for any of the NCBI gene entries in Table 5 or conducting a BLAST search using one of the sequences of Table 5.

TABLE 5

Exemplary beta-galactosidases

| Species | Database ID/Accession No. | SEQ ID NO: |
|---|---|---|
| Aspergillus niger | BGALA ASPOR | 15 |

[0107] Alpha and beta galactosidases are also described, e.g., in U.S. Pat. 9,402,885 and 6,197,566; which are incorporated by reference herein in their entireties.

[0108] In some embodiments of any of the aspects, the beta galactosidase is a lactase. As used herein, “lactase” refers to any enzyme that converts lactose to galactose and glucose monomers. The sequences of a number of lactases are known in the art and are readily obtained, e.g., from keyword or homology searches of publicly available databases, e.g., the NCBI or UNIPROT databases. Lactases are produced by a number of species. In some embodiments of any of the aspects, the lactase is a yeast lactase. In some embodiments of any of the aspects, the lactase is a fungal lactacase. In some embodiments of any of the aspects, the lactase is a mammalian (e.g., human) lactase.

[0109] In some embodiments of any of the aspects, the lactase is a lactase obtained or purified from a Kluyveromyces or Aspergillus species, or having the sequence of a lactase of a Kluyveromyces or Aspergillus species. In some embodiments of any of the aspects, the lactase is a lactase obtained or purified from Kluyveromyces lactis, Kluyveromyces marxianus, Aspergillus niger, or Aspergillus oryzae, or having the sequence of a lactase of Kluyveromyces lactis, Kluyveromyces marxianus, Aspergillus niger, or Aspergillus oryzae. These sequences are known in the art. For example, exemplary lactase sequences are provided in Table 13. In some embodiments of any of the aspects, the lactase has at least 80%, at least 85%, at least 90%, at least 95%, at least 98%, or greater sequence identity with one of SEQ ID NOs: 36-41. In some embodiments of any of the aspects, the lactase has at least 95% sequence identity with one of SEQ ID NOs: 36-41 and retains the wild-type activity of one of SEQ ID NOs: 36-41. Sequences for orthologs found in additional species are readily obtained, e.g., by clicking on the ortholog option for any of the NCBI gene entries in Table 13 or conducting a BLAST search using one of the sequences of Table 13.

TABLE 13

Exemplary lactases

| Species | Database ID/Accession No. | SEQ ID NO: |
|---|---|---|
| Kluvyveromyces lactis | PSP: P00723.2 | 36 |
| Kluyveromyces marxianus (anamorph is Candida pseudotropicalis) | KAG0680849.1 | 37 |
| Aspergillus niger | EHA26981.1 | 38 |
| Aspergillus niger | EHA26848.1 | 39 |
| Aspergillus oryzae | AHI44625.1 | 40 |
| Homo sapiens preprotein (mature protein is aa 869-1927) | NP_002290.2 | 41 |

[0110] As used herein, “sorbitol-degrading enzyme” refers to any enzyme that catabolizes sorbitol or a catabolic product of sorbitol. Sorbitol is a sugar alcohol having the structure of Formula I. Sorbitol-degrading enzymes include sorbitol dehydrogenase and sorbitol oxidase.

[chemical structure]

[0111] Sorbitol is catabolized to fructose by sorbitol dehydrogenases, e.g., sorbitol-6-phosphate-2-dehydrogenase. In some embodiments of any of the aspects, the sorbitol-degrading enzyme is a sorbitol dehydrogenase. In some embodiments of any of the aspects, a composition or combination comprising sorbitol dehydrogenase further comprises NAD+, which is a sorbitol dehydrogenase cofactor.

[0112] The sequences of a number of sorbitol dehydrogenases are known in the art and are readily obtained, e.g., from keyword or homology searches of publicly available databases, e.g., the NCBI or UNIPROT databases. Sorbitol dehydrogenases are produced by a number of species. In some embodiments of any of the aspects, the sorbitol dehydrogenase is a mammalian sorbitol dehydrogenase.

[0113] In some embodiments of any of the aspects, the sorbitol dehydrogenase is a sorbitol dehydrogenase obtained or purified from a Ovis or Rattus species, or having the sequence of a sorbitol dehydrogenase of a Ovis or Rattus species. In some embodiments of any of the aspects, the sorbitol dehydrogenase is a sorbitol dehydrogenase obtained or purified from a sheep or a rat, or having the sequence of a sorbitol dehydrogenase of a sheep or a rat. These sequences are known in the art. For example, sorbitol dehydrogenase sequences are provided in Table 6 for human, sheep, and rat. In some embodiments of any of the aspects, the sorbitol dehydrogenase has at least 80%, at least 85%, at least 90%, at least 95%, at least 98%, or greater sequence identity with one or more of SEQ ID NOs: 16-18. In some embodiments of any of the aspects, the sorbitol dehydrogenase has at least 95% sequence identity with one or more of SEQ ID NOs: 16-18 and retains the wild-type activity of one or more of SEQ ID NOs: 16-18. Sequences for orthologs found in additional species are readily obtained, e.g., by clicking on the ortholog option for any of the NCBI gene entries in Table 6 or conducting a BLAST search using one of the sequences of Table 6.

TABLE 6

Exemplary sorbitol dehydrogenases

| Species | NCBI ID | SEQ ID NO: |
|---|---|---|
| Homo sapiens | 6652 | 16 |
| Rattus norvegicus | 24788 | 17 |
| Ovis aries | 101115280 | 18 |

[0114] In some embodiments of any of the aspects, the sorbitol-degrading enzyme is a sorbitol oxidase. A sorbitol oxidase is an enzyme that catalyzes the oxidation of sorbitol to glucose. O₂ is a cofactor for sorbitol oxidase. The sequences of a number of sorbitol oxidases are known in the art and are readily obtained, e.g., from keyword or homology searches of publicly available databases, e.g., the NCBI or UNIPROT databases. Sorbitol oxidases are produced by a number of species. In some embodiments of any of the aspects, the sorbitol oxidase is a yeast sorbitol oxidase.

[0115] In some embodiments of any of the aspects, the sorbitol oxidase is a sorbitol oxidase obtained or purified from a Streptomyces species, or having the sequence of a sorbitol oxidase of a Streptomyces species. In some embodiments of any of the aspects, the sorbitol oxidase is a sorbitol oxidase obtained or purified from Streptomyces griseoflavus, or having the sequence of a sorbitol oxidase of Streptomyces griseoflavus. These sequences are known in the art. For example, sorbitol oxidase sequences are provided in Table 7 for Streptomyces griseoflavus. In some embodiments of any of the aspects, the sorbitol oxidase has at least 80%, at least 85%, at least 90%, at least 95%, at least 98%, or greater sequence identity with SEQ ID NO: 19. In some embodiments of any of the aspects, the sorbitol oxidase has at least 95% sequence identity with SEQ ID NO: 19 and retains the wild-type activity of SEQ ID NO: 19. Sequences for orthologs found in additional species are readily obtained, e.g., by clicking on the ortholog option for any of the NCBI gene entries in Table 7 or conducting a BLAST search using one of the sequences of Table 7.

TABLE 7

Exemplary sorbitol oxidase

| Species | Database ID/Accession No. | SEQ ID NO: |
|---|---|---|
| Streptomyces griseoflavus Tu4000 | EFL38250.1 | 19 |

[0116] As used herein, “mannitol-degrading enzyme” refers to any enzyme that catabolizes mannitol or a catabolic product of mannitol. Mannitol is a sugar alcohol having the structure of Formula II. Mannitol-degrading enzymes include mannitol dehydrogenase and mannitol oxidase.

[chemical structure]

[0117] Mannitol is catabolized to mannose by mannitol dehydrogenases. In some embodiments of any of the aspects, the mannitol-degrading enzyme is a mannitol dehydrogenase. In some embodiments of any of the aspects, a composition or combination comprising mannitol dehydrogenase further comprises NAD+, which is a mannitol dehydrogenase cofactor.

[0118] The sequences of a number of mannitol dehydrogenases are known in the art and are readily obtained, e.g., from keyword or homology searches of publicly available databases, e.g., the NCBI or UNIPROT databases. Mannitol dehydrogenases are produced by a number of species. In some embodiments of any of the aspects, the mannitol dehydrogenase is a yeast or bacterial mannitol dehydrogenase. In some embodiments of any of the aspects, the mannitol dehydrogenase is a bacterial mannitol dehydrogenase.

[0119] In some embodiments of any of the aspects, the mannitol dehydrogenase is a mannitol dehydrogenase obtained or purified from a Saccharomoyces, Pseudomas, Escherichia, Leuconostoc, or Gluconobacter spp., or having the sequence of a mannitol dehydrogenase of a Saccharomoyces, Pseudomas, Escherichia, Leuconostoc, or Gluconobacter spp. In some embodiments of any of the aspects, the mannitol dehydrogenase is a mannitol dehydrogenase obtained or purified from S. cerevisiae, P. fluorescens, E. coli, L. mesenteroides, or G. oxydans, or having the sequence of a mannitol dehydrogenase of S. cerevisiae, P. fluorescens, E. coli, L. mesenteroides, or G. oxydans. These sequences are known in the art. For example, mannitol dehydrogenase sequences are provided in Table 8 for S. cerevisiae, P. fluorescens, E. coli, L. mesenteroides, or G. oxydans. In some embodiments of any of the aspects, the mannitol dehydrogenase has at least 80%, at least 85%, at least 90%, at least 95%, at least 98%, or greater sequence identity with one or more of SEQ ID NOs: 20-26. In some embodiments of any of the aspects, the mannitol dehydrogenase has at least 95% sequence identity with one or more of SEQ ID NOs: 20-26 and retains the wild-type activity of one or more of SEQ ID NOs: 20-26. Sequences for orthologs found in additional species are readily obtained, e.g., by clicking on the ortholog option for any of the NCBI gene entries in the following Table or conducting a BLAST search using one of the sequences of the following Table.

TABLE 8

Exemplary mannitol dehydrogenases

| Species | Database ID/Accession No. | SEQ ID NO: |
|---|---|---|
| Pseudomonas fluorescens | 57515047 | 20 |
| Escherichia coli | OYI64916.1 | 21 |
| Escherichia coli | ETI79791.1 | 22 |
| Leuconostoc mesenteroides | 222544050 | 23 |
| Leuconostoc mesenteroides | ACT22631 | 24 |
| Saccharomyces cerevisiae S288C | NP_010844 | 25 |
| Gluconobacter oxydans | GEC60258.1 | 26 |

[0120] In some embodiments of any of the aspects, the mannitol-degrading enzyme is a mannitol oxidase. A mannitol oxidase is an enzyme that catalyzes the oxidation of mannitol to mannose. O₂ is a cofactor for mannitol oxidase. Mannitol oxidases are produced by a number of species. In some embodiments of any of the aspects, the mannitol oxidase is a yeast mannitol oxidase or a gastropod mannitol oxidase. Further discussion of mannitol oxidases and their isolation can be found, e.g., in Vorhaben JE et al (1986). Int. J. Biochem. 18 (4): 337-44; and Large AT, et al. (1993). Protoplasma. 175 (3-4): 93-101; each of which is incorporated by reference herein in its entirety.

[0121] Some oxidases can catabolize both mannitol and sorbitol. Accordingly, in some embodiments, an enzyme identified herein as a “sorbitol oxidase” or a “mannitol oxidase” can comprise both of those activities, e.g., it can be a “mannitol and sorbitol oxidase.” In any of the embodiments of any of the aspects herein, wherein a “sorbitol oxidase” or “mannitol oxidase” is recited, a “mannitol and sorbitol oxidase” is contemplated as meeting the recitation and/or can be used instead. An oxidase can have a preference for either sorbitol or mannitol.

[0122] In some embodiments of any of the aspects, mannitol and sorbitol oxidase is a mannitol and sorbitol oxidase obtained or purified from a Streptomyces or Acidothermus species, or having the sequence of a mannitol and sorbitol oxidase of a Streptomyces or Acidothermus species. In some embodiments of any of the aspects, mannitol and sorbitol oxidase is a mannitol and sorbitol oxidase obtained or purified from Streptomyces, Streptomyces sp. H7775, or Acidothermus cellulolyticus, or having the sequence of a mannitol and sorbitol oxidase of Streptomyces, Streptomyces sp. H7775, or Acidothermus cellulolyticus. These sequences are known in the art. For example, exemplary mannitol and sorbitol oxidase sequences are provided in Table 12. In some embodiments of any of the aspects, the mannitol and sorbitol oxidase has at least 80%, at least 85%, at least 90%, at least 95%, at least 98%, or greater sequence identity with at least one of SEQ ID NOs: 32-35. In some embodiments of any of the aspects, the mannitol and sorbitol oxidase has at least 95% sequence identity with at least one of SEQ ID NOs: 32-35 and retains the wild-type activity of at least one of SEQ ID NOs: 32-35. Sequences for orthologs found in additional species are readily obtained, e.g., by clicking on the ortholog option for any of the NCBI gene entries in Table 12 or conducting a BLAST search using one of the sequences of Table 12.

TABLE 12

Exemplary mannitol and sorbitol oxidases

| Species | Database ID/Accession No. | SEQ ID NO: |
|---|---|---|
| Streptomyces sp. | WP_011030685.1 | 32 |
| Acidothermus cellulolyticus | WP_011719559.1 | 33 |
| Streptomyces sp. H7775 | n/a | 34 |
| Streptomyces sp. | BAA95146.1 | 35 |

[0123] In some embodiments of any of the aspects, the mannitol and/or sorbitol oxidase has at least 80%, at least 85%, at least 90%, at least 95%, at least 98%, or 100% sequence identity with any one of SEQ ID NOs: 51-304. In some embodiments of any of the aspects, the mannitol and/or sorbitol oxidase has at least 95% sequence identity with any one of SEQ ID NOs: 51-304. In some embodiments of any of the aspects, the mannitol and/or sorbitol oxidase has at at least 95% sequence identity with any one of SEQ ID NOs: 51-304 and retains the wild-type activity of the reference sequence selected from SEQ ID NOs: 51-304. In some embodiments of any of the aspects, the mannitol and/or sorbitol oxidase has the sequence of any one of SEQ ID NOs: 51-304.

[0124] As used herein, “glucose isomerase” refers to any enzyme that converts glucose to fructose or fructose to glucose. Glucose isomerase is also known in the art as xylose isomerase. The sequences of a number of glucose isomerases are known in the art and are readily obtained, e.g., from keyword or homology searches of publicly available databases, e.g., the NCBI or UNIPROT databases. Glucose isomerases are produced by a number of species. In some embodiments of any of the aspects, the glucose isomerase is a yeast glucose isomerase.

[0125] In some embodiments of any of the aspects, glucose isomerase is a glucose isomerase obtained or purified from a Streptomyces species, or having the sequence of a glucose isomerase of a Streptomyces species. In some embodiments of any of the aspects, glucose isomerase is a glucose isomerase obtained or purified from Streptomyces murinus, or having the sequence of a glucose isomerase of Streptomyces murinus. These sequences are known in the art. For example, a glucose isomerase sequence is provided in Table 9 for Streptomyces murinus. In some embodiments of any of the aspects, the glucose isomerase has at least 80%, at least 85%, at least 90%, at least 95%, at least 98%, or greater sequence identity with SEQ ID NO: 27. In some embodiments of any of the aspects, the glucose isomerase has at least 95% sequence identity with SEQ ID NO: 27 and retains the wild-type activity of SEQ ID NOs: 27. Sequences for orthologs found in additional species are readily obtained, e.g., by clicking on the ortholog option for any of the NCBI gene entries in Table 9 or conducting a BLAST search using one of the sequences of Table 9.

TABLE 9

Exemplary glucose isomerase

| Species | Database ID/Accession No. | SEQ ID NO: |
|---|---|---|
| Streptomyces murinus | CAA00885.1 | 27 |

[0126] As used herein, “mannose isomerase” refers to any enzyme that converts mannose to fructose or fructose to mannose. The sequences of a number of mannose isomerases are known in the art and are readily obtained, e.g., from keyword or homology searches of publicly available databases, e.g., the NCBI or UNIPROT databases. Mannose isomerases are produced by a number of species. In some embodiments of any of the aspects, the mannose isomerase is a yeast mannose isomerase.

[0127] In some embodiments of any of the aspects, mannose isomerase is a mannose isomerase obtained or purified from a Thermobifida species, or having the sequence of a mannose isomerase of a Thermobifida species. In some embodiments of any of the aspects, mannose isomerase is a mannose isomerase obtained or purified from Thermobifida fusca, or having the sequence of a mannose isomerase of Thermobifida fusca. These sequences are known in the art. For example, a mannose isomerase sequence is provided in Table 10 for Thermobifida fusca. In some embodiments of any of the aspects, the mannose isomerase has at least 80%, at least 85%, at least 90%, at least 95%, at least 98%, or greater sequence identity with SEQ ID NO: 28. In some embodiments of any of the aspects, the mannose isomerase has at least 95% sequence identity with SEQ ID NO: 28 and retains the wild-type activity of SEQ ID NO: 28. Sequences for orthologs found in additional species are readily obtained, e.g., by clicking on the ortholog option for any of the NCBI gene entries in Table 10 or conducting a BLAST search using one of the sequences of Table 10.

TABLE 10

Exemplary mannose isomerase

| Species | Database ID/Accession No. | SEQ ID NO: |
|---|---|---|
| Thermobifidia fusca | BAP46301.1 | 28 |

[0128] It is contemplated herein that multiple members of any of the foregoing categories and classifications can be used in the same composition or combination. Any combination or mixture of the foregoing categories and classifications is contemplated herein. Merely by way of example, the following combinations are contemplated herein:
[0129] a. One or more fructan-degrading enzymes (e.g., one or more exo-inulinases, one or more endo-inulinases, one or more exo-levanases, one or more endo-levanases, and/or one or more amyloglucosidases); one or more galactosidases (e.g., one or more alpha-galactosidases and/or one or more beta-galactosidases); one or more sorbitol-degrading enzymes (e.g., one or more sorbitol dehydrogenases and/or sorbitol oxidases); one or more mannitol-degrading enzymes (e.g., one or more mannitol dehydrogenases and/or mannitol oxidases); one or more glucose isomerases; and one or more mannose isomerases.
[0130] b. One or more fructan-degrading enzymes (e.g., one or more exo-inulinases, one or more endo-inulinases, one or more exo-levanases, one or more endo-levanases, and/or one or more amyloglucosidases); one or more galactosidases (e.g., one or more alpha-galactosidases and/or one or more beta-galactosidases); one or more sorbitol-degrading enzymes (e.g., one or more sorbitol dehydrogenases and/or sorbitol oxidases); one or more mannitol-degrading enzymes (e.g., one or more mannitoldehydrogenases and/or mannitol oxidases); and one or more glucose isomerases.
[0131] c. One or more fructan-degrading enzymes (e.g., one or more exo-inulinases, one or more endo-inulinases, one or more exo-levanases, one or more endo-levanases, and/or one or more amyloglucosidases); one or more galactosidases (e.g., one or more alpha-galactosidases and/or one or more beta-galactosidases); one or more sorbitol-degrading enzymes (e.g., one or more sorbitol dehydrogenases and/or sorbitol oxidases); one or more mannitol-degrading enzymes (e.g., one or more mannitol dehydrogenases and/or mannitol oxidases); and one or more mannose isomerases.
[0132] d. One or more fructan-degrading enzymes (e.g., one or more exo-inulinases, one or more endo-inulinases, one or more exo-levanases, one or more endo-levanases, and/or one or more amyloglucosidases); one or more galactosidases (e.g., one or more alpha-galactosidases and/or one or more beta-galactosidases); one or more sorbitol-degrading enzymes (e.g., one or more sorbitol dehydrogenases and/or sorbitol oxidases); and one or more mannitol-degrading enzymes (e.g., one or more mannitol dehydrogenases and/or mannitol oxidases.
[0133] e. One or more fructan-degrading enzymes (e.g., one or more exo-inulinases, one or more endo-inulinases, one or more exo-levanases, one or more endo-levanases, and/or one or more amyloglucosidases); one or more galactosidases (e.g., one or more alpha-galactosidases and/or one or more beta-galactosidases); and one or more sorbitol-degrading enzymes (e.g., one or more sorbitol dehydrogenases and/or sorbitol oxidases).
[0134] f. One or more fructan-degrading enzymes (e.g., one or more exo-inulinases, one or more endo-inulinases, one or more exo-levanases, one or more endo-levanases, and/or one or more amyloglucosidases); one or more galactosidases (e.g., one or more alpha-galactosidases and/or one or more beta-galactosidases); and one or more mannitol-degrading enzymes (e.g. one or more mannitol dehydrogenases and/or mannitol oxidases).
[0135] g. One or more fructan-degrading enzymes (e.g., one or more exo-inulinases, one or more endo-inulinases, one or more exo-levanases, one or more endo-levanases, and/or one or more amyloglucosidases); and one or more galactosidases (e.g., one or more alpha-galactosidases and/or one or more beta-galactosidases).
[0136] h. One or more fructan-degrading enzymes (e.g., one or more exo-inulinases, one or more endo-inulinases, one or more exo-levanases, one or more endo-levanases, and/or one or more amyloglucosidases); and one or more sorbitol-degrading enzymes (e.g., one or more sorbitol dehydrogenases and/or sorbitol oxidases).
[0137] i. One or more fructan-degrading enzymes (e.g., one or more exo-inulinases, one or more endo-inulinases, one or more exo-levanases, one or more endo-levanases, and/or one or more amyloglucosidases); and one or more mannitol-degrading enzymes (e.g., one or more mannitol dehydrogenases and/or mannitol oxidases).
[0138] j. One or more fructan-degrading enzymes (e.g., one or more exo-inulinases, one or more endo-inulinases, one or more exo-levanases, one or more endo-levanases, and/or one or more amyloglucosidases); and one or more glucose isomerases.
[0139] k. One or more fructan-degrading enzymes (e.g., one or more exo-inulinases, one or more endo-inulinases, one or more exo-levanases, one or more endo-levanases, and/or one or more amyloglucosidases); and one or more mannose isomerases.
[0140] 1. One or more fructan-degrading enzymes (e.g., one or more exo-inulinases, one or more endo-inulinases, one or more exo-levanases, one or more endo-levanases, and/or one or more amyloglucosidases); one or more glucose isomerases; and one or more mannose isomerases.
[0141] m. One or more fructan-degrading enzymes (e.g., one or more exo-inulinases, one or more endo-inulinases, one or more exo-levanases, one or more endo-levanases, and/or one or more amyloglucosidases); one or more galactosidases (e.g., one or more alpha-galactosidases and/or one or more beta-galactosidases); one or more glucose isomerases; and one or more mannose isomerases.
[0142] n. One or more fructan-degrading enzymes (e.g., one or more exo-inulinases, one or more endo-inulinases, one or more exo-levanases, one or more endo-levanases, and/or one or more amyloglucosidases); one or more galactosidases (e.g., one or more alpha-galactosidases and/or one or more beta-galactosidases); and one or more mannose isomerases.
[0143] o. One or more fructan-degrading enzymes (e.g., one or more exo-inulinases, one or more endo-inulinases, one or more exo-levanases, one or more endo-levanases, and/or one or more amyloglucosidases); one or more galactosidases (e.g., one or more alpha-galactosidases and/or one or more beta-galactosidases); and one or more glucose isomerases.
In some embodiments of examples a-o of this paragraph, the one or more fructan-degrading enzymes can comprise or be an exo-inulinase. In some embodiments of examples a-o of this paragraph, the one or more fructan-degrading enzymes can comprise or be an endo-inulinase. In some embodiments of examples a-o of this paragraph, the one or more fructan-degrading enzymes can comprise or be an endo-levanase. In some embodiments of examples a-o of this paragraph, the one or more fructan-degrading enzymes can comprise or be an exo-levanase. In some embodiments of examples a-o of this paragraph, the one or more galactosidases can comprise or be an alpha-galactosidase. In some embodiments of examples a-o of this paragraph, the one or more galactosidases can comprise or be a beta-galactosidase. In some embodiments of examples a-o of this paragraph, the one or more galactosidases can comprise or be a lactase. In some embodiments of examples a-o of this paragraph, the one or more sorbitol-degrading enzymes can comprise or be sorbitol dehydrogenase. In some embodiments of examples a-o of this paragraph, the one or more sorbitol-degrading enzymes can comprise or be sorbitol oxidase. In some embodiments of examples a-o of this paragraph, the one or more mannitol-degrading enzymes can comprise or be mannitol dehydrogenase. In some embodiments of examples a-o of this paragraph, the one or more mannitol-degrading enzymes can comprise or be mannitol oxidase.

[0144] The compositions and combinations described herein can further comprise one or more of a cofactor; a metal ion; an antacid; an H2 antagonist; a proton pump inhibitor; a pepstatin protease inhibitor; or a protease inhibitor.

[0145] In some embodiments of any of the aspects, an enzyme can be a thermo-resistant or acid-resistant variant. Thermo-resistant or acid-resistant variants can be orthologs of an enzyme described herein from a thermophile (e.g., hyperthermophile) or acidophile species, respectively. Such orthologs can be identified by, e.g, a BLAST search of the thermophile or acidophile’s sequence data and selecting the most homologous enzyme found therein. Alternatively, the ortholog can be a sequence with at least 60%, at least 70%, at least 80%, at least 85%, at least 90%, at least 95% or more sequence identity to a reference enzyme described herein. Thermophiles and acidophiles are well known in the art, see, e.g., Acetobacter and Thermus species, and their sequence information is publically available. See, e.g., Brumm et al. PLoS One 2015 10:e0138674; Hirose et al. Microbiology Resource Announcements (2020) 9:e00962-20; Illeghems et al. BMC Genomics (2013) 14:526; Jia et al. Front. Bioeng. Biotechnol. (2017) 5:33; and Zhang et la. Int. J. Mol Sci (2016) 17:1355; each of which is incorporated by reference herein in

[0146] Additionally, the sequence of any enzyme described herein can be engineered or mutated to be more thermo- or acid-resistant. In some embodiments of any of the aspects, an enzyme described herein has a sequence which is at least 80% identical to a reference sequence provided herein and comprises one or more mutations that make it more thermo- or acid-resistant, while retaining the wild-type activity. In some embodiments of any of the aspects, an enzyme described herein has a sequence which is at least 95% identical to a reference sequence provided herein and comprises one or more mutations that make it more thermo- or acid-resistant, while retaining the wild-type activity.

[0147] One of skill in the art is aware of appropriate changes to make to a sequence to obtain such a variant. By way of non-limiting example, substitution of glycine residues with alanine, substitution of alanine residues with proline, substitution of lysine residues with arginine, an increase in ion pairs, a decrease in β-branched residues within helix structures, a decrease in Asn residues available for deamidation, a decrease in cysteine residues, a decrease in glycine residues, an increase in proline residues, a decrease in loop length, all contribute to thermoresistance. Such alterations are described, e.g., in Vielle Microbiol Mol Biol Rev (2001) 65:1-43; Van den Burg et al. PNAS (1998) 95:2056-2060; Sarkar et al. PNAS (2008) 105 (39):14808-13; Asial et al. Nature Communications (2013) 4: 2901; Hoseki et al. Journal of Biochemistry (1999) 126 (5): 951-6; Sayed et al. The Journal of Biological Chemistry (2014) 289 (3): 1675-87; Perl et al. Nature Structural Biology (2000) 7 (5): 380-3; Lehmann et al. Biochimica et Biophysica Acta (BBA) - Protein Structure and Molecular Enzymology (2000) 1543 (2): 408-415; Sauer et al. Biophysical Journal. (2015) 109 (7): 1420-8; Liu et al. Protein Engineering (2013) 16 (1): 19-25; Lee et al. PLOS ONE (2014) 9 (11): e112751; Mansfeld et al. The Journal of Biological Chemistry (1997) 272 (17): 11152-6; Zhang et al. Scientific Reports (2016) 6:33797; each of which are incorporated by reference herein in their entireties. Similar such alterations are described for acid-resistance, e.g., in Liu et al. Biotechnology and Bioeng (2019) 116:833-43; which is incorporated by reference herein in its entirety. As a further non-limiting example, thermoresistant and acid resistant lactases are known in the art, see, e.g., Chiba et al. Journal of Bioscience and Bioengineering 2015 120:263-7 and Macris. Appl Enivron Microbiol 1982 44:1035-8, each of which is incorporated by reference herein in its entirety.

[0148] Appropriate variants can also be designed using software available for such purposes, e.g., Rosetta3 (see Richter et al. PLoS ONE (2011) 6:e19230) and iStable 2.0 (see Chen et al. Computational and Structural Biotech J (2020) 18:622-30) (see generally Thiltgen et al. PLoS ONE 2012 7:e46084) or obtained from a commercial source which will prepare such variants,e g., as CinderBio (cinderbio.com/), SwissAustral (swissaustral.ch/), and Gene & GreenTK (gene-greentk.com/). The foregoing references are incorporated by reference herein in their entireties.

[0149] In some embodiments of any of the aspects, the composition or combination described herein can be formulated as a powder, a solution, a pill, a capsule, a concentrate, a tablet, a soft-gel, a thin-film, a liquid, and/or a syrup. Additional suitable formulations include chewable tablets, quick dissolve tablets, effervescent tablets, reconstitutable powders, elixirs, solutions, suspensions, emulsions, multi-layer tablets, bi-layer tablets, gelatin capsules, hard gelatin capsules, caplets, lozenges, chewable lozenges, beads, powders, granules, particles, microparticles, dispersible granules, and combinations thereof.

[0150] In some embodiments of any of the aspects, the composition or combination described herein can be formulated with an enteric coating, e.g., a material that dissolves or degrades after passing through the stomach. Such materials are well known in the art and include, but are not limited to, methyl acrylate-methacrylic acid copolymers; cellulose acetate phthalate (CAP); cellulose acetate succinate; hydroxypropyl methyl cellulose phthalate; hydroxypropyl methyl cellulose acetate succinate (hypromellose acetate succinate); polyvinyl acetate phthalate (PVAP); methyl methacrylate-methacrylic acid copolymers; shellac; cellulose acetate trimellitate; sodium alginate; zein; and an enteric coating aqueous solution comprising ethylcellulose, medium chain triglycerides [coconut], oleic acid, sodium alginate, and stearic acid.

[0151] The inventor has surprisingly found that the compositions and combinations described exhibit improved performance in the absence of a capsule and/or enteric coating. This is particularly surprising as nearly every digestive enzyme supplement commercially available is provided in a capsule format. Accordingly, specifically contemplated herein are compositions and combinations formulated as powders, tablets, chewables, and other forms lacking a coating and/or capsule, particularly an enteric coating or capsule. In some embodiments of any of the aspects, a composition or combination described herein does not comprise a coating or capsule, e.g., an enteric coating or capsule. In addition, the inventor has found that increased saliva production at the time of administration also provides improved performance for the compositions and combinations described herien. Accordingly, specifically contemplated herein are compositions and combinations in chewable formulations, e.g., chewable tablets, chewable gummies, or other formats.

[0152] It is contemplated herein that the enzymes of the compositions and combinations described herein can be active in vitro or in vivo (e.g., in the mouth, the stomach, or the intestines).

[0153] The inventor has surprisingly found that the compositions and combinations described herein exhibit improved performance when administered with proteins and/or fats. Accordingly, contemplated herein are kits instructing the user to consume the composition or combination with proteins and/or fats. Alternatively, the composition or combination can further comprise proteins and/or fats to ensure adequate amounts are administered. In some embodiments of any of the aspects, a composition or combination described herein comprises at least 5% protein and/or fat by weight. In some embodiments of any of the aspects, a composition or combination described herein comprises at least 10% protein and/or fat by weight. In some embodiments of any of the aspects, a composition or combination described herein comprises at least 15% protein and/or fat by weight. In some embodiments of any of the aspects, a composition or combination described herein comprises at least 20% protein and/or fat by weight.

[0154] In some embodiments of any of the aspects, a composition or combination described herein comprises from about 5% to about 50% protein and/or fat by weight. In some embodiments of any of the aspects, a composition or combination described herein comprises from about 10% to about 40% protein and/or fat by weight. In some embodiments of any of the aspects, a composition or combination described herein comprises from about 20% to about 30% protein and/or fat by weight. In some embodiments of any of the aspects, a composition or combination described herein comprises from 5% to 50% protein and/or fat by weight. In some embodiments of any of the aspects, a composition or combination described herein comprises from 10% to 40% protein and/or fat by weight. In some embodiments of any of the aspects, a composition or combination described herein comprises from 20% to 30% protein and/or fat by weight.

[0155] In some embodiments of any of the aspects, the protein and/or fat comprises, consists of, or consists esstentially of protein. In some embodiments of any of the aspects, the protein and/or fat comprises, consists of, or consists essentially of fat.

[0156] In some embodiments of any of the aspects, the composition or combination further comprises an emulsifier or other inactive ingredients such as sweeteners and/or flavorings, which can be artificial.

[0157] In some embodiments of any of the aspects, the composition or combination is provided in a nutraceutical, dietary formulation, and/or dietary supplement. In some embodiments of any of the aspects, a nutraceutical, dietary formulation, and/or dietary supplement can be provided in the form of a shake, meal replacement shake, drink, smoothie, powder, bars, or the like.

[0158] As used herein, “nutraceutical” refers to compositions that are useful in both the nutritional and pharmaceutical field of application. Thus, nutraceutical compositions of the present invention may be used as supplements and/or alternatives to food and beverages, and as pharmaceutical formulations which may be solid formulations such as capsules or tablets, or liquid formulations, such as solutions or suspensions. In some embodiments of any of the aspects, nutraceutical compositions may also comprise food and beverages as described herein, as well as supplement compositions, for example dietary supplements.

[0159] A dietary formulation can contain all essential amino acids, as well as essential vitamins and minerals to ensure that the recipient is obtaining all necessary nutrients. When the formulation is in the form of a dietary supplement, the formulation can provide about 5% to 60% of total energy expenditure in terms of calories. Use of such a supplement is expected to produce the same beneficial results as described herein for the dietary formulations when combined with a diet. The dietary formulation or supplement can also be made in powder form by increasing the percent total solids of the formula, using procedures well known to those skilled in the art. The concentrate or powder can then be reconstituted for feeding by adding water (tap or deionized-sterilized water).

[0160] In some embodiments of any of the aspects, a dietary formulation or supplement can further comprise additional components such as one or more essential fatty acids, a source of carbohydrate, a source of protein, a source of vitamins and minerals, and an emulsifier. The source of carbohydrates can be any simple or complex carbohydrate, e.g., monosaccharides, disaccharides, or oligosaccharides. In one embodiment the source of carbohydrate is at least one of corn starch, dextrose, and glucose. The source of protein can be any protein hydrolysate or peptide mixtures, amino acid mixtures of high biologic values, e.g., meat, milk, egg or soy proteins. The protein hydrolysate can be partially hydrolyzed in nature and include a substantial fraction of variable chain length peptides, e.g., medium or short chain peptides, e.g., di- and tri-peptides, but have less than about 10% free amino acids, more preferably less than about 5% free amino acids. In one embodiment, only the highest biological value proteins are hydrolyzed, e.g., whey, lactalbumin, casein, egg white, egg solids, soy, or delactosed milk solids. In other embodiments, the protein source is lactose-free, and free amino acids are avoided in the formulation. In some embodiments of any of the aspects, a dietary formulation can further comprise a source of vitamins and minerals. For example, vitamins and minerals in accordance with, or approximately, the Recommended Dietary Allowance (RDA), now called the Daily Reference Intake (DRI). The dietary formulations can also contain nutrients not recommended by the DRI, e.g., nucleotides, beta-carotene, carnitine, and taurine. In some embodiments of any of the aspects, a dietary formulation can further comprise an emulsifier or other inactive ingredients such as sweeteners and/or flavorings, which can be artificial. A dietary formulation of the present invention may be in the form of a dietary supplement or used in a feeding regimen. In one embodiment, the dietary formulation is provided in a form suitable for oral administration. The dietary formulation can contain all essential amino acids, as well as essential vitamins and minerals to ensure that the recipient is obtaining all necessary nutrients. When the formulation is in the form of a dietary supplement, the formulation should provide about 5% to 60% of total energy expenditure in terms of calories.

[0161] The compositions and/or combinations described herein can be administered in such oral dosage forms as immediate release, controlled release and/or sustained release tablets or capsules, pills, powders, granules, elixirs, tinctures, suspensions, syrups and emulsions. For oral administration in the form of a tablet or capsule (e.g., a gelatin capsule), one or more enzymes can be combined with an oral, non-toxic pharmaceutically acceptable inert carrier such as ethanol, glycerol, water and the like. Moreover, when desired or necessary, suitable binders, lubricants, disintegrating agents and coloring agents can also be incorporated into the mixture. Suitable binders include starch, magnesium aluminum silicate, starch paste, gelatin, methylcellulose, sodium carboxymethylcellulose and/or polyvinylpyrrolidone, natural sugars such as glucose or β-lactose, corn sweeteners, natural and synthetic gums such as acacia, tragacanth or sodium alginate, polyethylene glycol, waxes and the like. Lubricants used in these dosage forms include sodium oleate, sodium stearate, magnesium stearate, sodium benzoate, sodium acetate, sodium chloride, silica, talcum, stearic acid, its magnesium or calcium salt and/or polyethyleneglycol and the like. Disintegrators include, without limitation, starch, methyl cellulose, agar, bentonite, xanthan gum starches, agar, alginic acid or its sodium salt, or effervescent mixtures, and the like. Diluents include, e.g., cellulose and/or glycine.

[0162] Examples of formulations suitable for oral administration include, but are not limited to one or more enzyme(s) present in, chewable tablets, quick dissolve tablets, effervescent tablets, dissolvable strips, reconstitutable powders, elixirs, liquids, solutions, suspensions, emulsions, tablets, multi-layer tablets, bi-layer tablets, capsules, soft gelatin capsules, hard gelatin capsules, caplets, lozenges, chewable lozenges, beads, powders, granules, particles, microparticles, dispersible granules, health bars, confections, animal feeds, cereals, yogurts, cereal coatings, foods, nutritive foods, functional foods and combinations thereof.

[0163] The compositions and combinations described herein can also be administered in the form of liposome delivery systems, such as small unilamellar vesicles, large unilamellar vesicles and multilamellar vesicles. Liposomes can be formed from a variety of phospholipids, containing cholesterol, stearylamine or phosphatidylcholines. In some embodiments of any of the aspects, a film of lipid components is further hydrated with an aqueous solution of a drug to a form lipid layer encapsulating the drug, as described in U.S. Pat. No. 5,262,564.

[0164] For solid compositions, excipients include pharmaceutical grades of mannitol, lactose, starch, magnesium stearate, sodium saccharin, talcum, cellulose, glucose, sucrose, magnesium carbonate, and the like may be used. It is also possible for the compositions and combinations described herein to be coupled with soluble polymers as targetable drug carriers. Such polymers can include polyvinylpyrrolidone, pyran copolymer, polyhydroxypropyl-methacrylamide-phenol, polyhydroxyethylaspanamide-phenol, or polyethyleneoxidepolylysine substituted with palmitoyl residues. Furthermore, the compositions and combinations described herein may be coupled to a class of biodegradable polymers useful in achieving controlled release of a drug, for example, polylactic acid, polyepsilon caprolactone, polyhydroxy butyric acid, polyorthoesters, polyacetals, polydihydropyrans, polycyanoacrylates and cross-linked or amphipathic block copolymers of hydrogels.

[0165] Pharmaceutically acceptable carriers and diluents include saline, aqueous buffer solutions, solvents and/or dispersion media. The use of such carriers and diluents is well known in the art. Some non-limiting examples of materials which can serve as pharmaceutically-acceptable carriers include: (1) sugars, such as lactose, glucose and sucrose; (2) starches, such as corn starch and potato starch; (3) cellulose, and its derivatives, such as sodium carboxymethyl cellulose, methylcellulose, ethyl cellulose, microcrystalline cellulose and cellulose acetate; (4) powdered tragacanth; (5) malt; (6) gelatin; (7) lubricating agents, such as magnesium stearate, sodium lauryl sulfate and talc; (8) excipients, such as cocoa butter and suppository waxes; (9) oils, such as peanut oil, cottonseed oil, safflower oil, sesame oil, olive oil, corn oil and soybean oil; (10) glycols, such as propylene glycol; (11) polyols, such as glycerin, sorbitol, mannitol and polyethylene glycol (PEG); (12) esters, such as ethyl oleate and ethyl laurate; (13) agar; (14) buffering agents, such as magnesium hydroxide and aluminum hydroxide; (15) alginic acid; (16) pyrogen-free water; (17) isotonic saline; (18) Ringer’s solution; (19) ethyl alcohol; (20) pH buffered solutions; (21) polyesters, polycarbonates and/or polyanhydrides; (22) bulking agents, such as polypeptides and amino acids (23) serum component, such as serum albumin; (22) C₂-C₁₂ alcohols, such as ethanol; (23) silicone dioxide, and (24) other non-toxic compatible substances employed in pharmaceutical formulations. In some embodiments of any of the aspects, the excipient comprises, consists of, or consists essentially of silicone dioxide. Wetting agents, coloring agents, release agents, coating agents, sweetening agents, flavoring agents, perfuming agents, preservative and antioxidants can also be present in the formulation. The terms such as “excipient”, “carrier”, “pharmaceutically acceptable carrier” or the like are used interchangeably herein. In some embodiments of any of the aspects, the carrier inhibits the degradation of the active agent.

[0166] In some embodiments of any of the aspects, the composition or combination described herein is provided or present as a single composition, e.g., each of the elements of the composition or combination are present in a single physical preparation, e.g., a single pill, tablet, gel, film, liquid, or solution.

[0167] In some embodiments of any of the aspects, the composition or combination described herein is provided or present as combination, set, or kit of multiple physical compositions, e.g., the elements of the composition or combination are present in a separate physical preparations, e.g., a separate pill, tablet, gel, film, liquid, or solution. The multiple physical compositions or preparations can be mixed prior to administration or consumption and/or administered or consumed as separate physical compositions or preparations.

[0168] In some embodiments of any of the aspects, the composition or combination does not comprise a live microbe. In some embodiments of any of the aspects, the composition or combination does not comprise an intact microbe, e.g., it does not comprise a killed microbe but can comprise portions or isolated/purified elements of a microbe. In some embodiments of any of the aspects, the composition or combination does not comprise a live yeast. In some embodiments of any of the aspects, the composition or combination does not comprise an intact yeast, e.g., it does not comprise a killed yeast but can comprise portions or isolated/purified elements of a yeast. In some embodiments of any of the aspects, the composition or combination does not comprise a live bacterium. In some embodiments of any of the aspects, the composition or combination does not comprise an intact bacterium, e.g., it does not comprise a killed microbe but can comprise portions or isolated/purified elements of a bacterium.

[0169] In some embodiments of any of the aspects, the composition or combination is sterilized, pasteurized, or thermized, e.g., irradiated, pascalized, UHT sterilized, pulsed electric field (PEF) pasteurized, microwave volumetric heating (MVH) pasteurized, or low temperature short time (LTST) pasteurized.

[0170] In some embodiments of any of the aspects, the composition or combination comprises a live microbe. In some embodiments of any of the aspects, the composition or combination comprises a live probiotic microbe. Non-limiting examples of probiotic microbes include Lactobacillus spp; Leuconostoc spp.; Bifidobacterium spp.; Lactococcus spp.; Lactobacillus bulgaricus; Leuconostoc mesenteroides; Lactobacillus plantarum; Pediococcus pentosaceus; Lactobacillus brevis; Leuconostoc citreum, Leuconostoc argentinum; Lactobacillus paraplantarum; Lactobacillus coryniformis; Weissella spp; L. pentosus; L. lactis; L. fermentum; Lactobacillus acidophilus, Bifidobacterium bifidum, Streptococcus thermophilus, Lactobacillus delbrueckii subsp. Bulgaricus; Lactobacillus helveticus; Lactobacillus kefiranofaciens, Lactobacillus rhamnosus; Lactobacillus casei; Lactobacillus johnsonii; Saccharomyces boulardii; Gluconacetobacter xylinus; Zygosaccharomyces sp.; Acetobacter pasteurianus; A. aceti; and Gluconobacter oxydans. In some embodiments of any of the aspects, the composition or combination comprises one or more live microbes selected from Aspergillus spp; Kluyveromyces spp; Aspergillus niger; Aspergillus oryzae; Kluyveromyces marxianus, Kluyveromyces marxianus CBS6014; Penicillium spp; Lactobacillus spp.; Aspergillus luchuensis; Saccharomyces spp; Aspergillus fumigatus; Saccharomyces cerevisiae; Kluyveromyces lactis; Streptomyces griseoflavus; Pseudomas spp.; Escherichia spp.; Leuconostoc spp; Gluconobacter spp.; S. cerevisiae, P. fluorescens, E. coli, L. mesenteroides, G. oxydans; Acidothermus spp.; Streptomyces sp. H7775; Streptomyces murinus; Acidothermus cellulolyticus; Thermobifida spp.; and Thermobifida fusca. In some embodiments of any of the aspects, the composition or combination comprises one or more live microbes selected from Penicillium spp; Bacillus spp.; P. fluorescens. A live microbe can be a wild-type or transgenic or genetically modified microbe. In some embodiments of any of the aspects, one or more enzymes of the composition or combination are produced, expressed by, or present in the one or more live microbes. In some embodiments of any of the aspects, the one or more live microbes do not produce, express, or comprise the one or more enzymes of the composition or combination.

[0171] In some embodiments of any of the aspects, the composition or combination described herein does not comprise flour, grains, or vegetable (e.g., plant) material. Flour and vegetable material are meant to refer to materials obtained from, respectively grains and plants, which is subject to chopping, grinding, or other gross processing methods and which comprise at least 30% of the different compounds present in the original material. Flour and vegetable material do not refer to isolated or purified materials obtained from plant origins, e.g., soluble starch.

[0172] In some embodiments of any of the aspects, the composition or combination further comprises fructose dehydrogenase, e.g., 5-D-fructose dehydrogenase.

[0173] In some embodiments of any of the aspects, the composition or combination does not comprise an invertase. In some embodiments of any of the aspects, the composition or combination does not comprise an exo-inulinase. In some embodiments of any of the aspects, the composition or combination does not comprise a beta-fructofuranosidase. In some embodiments of any of the aspects, the composition or combination does not comprise a beta-fructosidase.

[0174] In some embodiments of any of the aspects, the composition or combination does not comprise an alpha-galactosidase, a beta-glucanase, and/or a pectinase.

[0175] In one aspect of any of the embodiments, described herein is a kit comprising one or more of the compositions or combinations described herein. If the kit comprises multiple compositions and/or a combination of multiple elements (e.g., agents or enzymes), the multiple elements can be present in the same formulation of the kit or in separate formulations of the kit, e.g., for separate administration or for mixing prior to administration.

[0176] A kit is any manufacture (e.g., a package or container) comprising at least one agent, e.g., an enzyme, the manufacture being promoted, distributed, or sold as a unit for performing the methods described herein. The kits described herein can optionally comprise additional components useful for performing the methods described herein. By way of example, the kit can comprise measuring devices, or dosage guides, suitable for performing one or more of the administrations according to the methods described herein, an instructional material which describes performance of a method as described herein, and the like. Additionally, the kit may comprise an instruction leaflet.

[0177] In some embodiments of any of the aspects, where the combination or composition is formulated as a powder, the kit can comprise a dispenser for the powder, e.g., a shaker; a spoon sized or marked for a desired dosage; single dosage packets; resealable tubs, jars, or bags;

[0178] In a combination of elements (e.g., agents and/or enzymes), the different elements can be provided in a mixture or single formulation. Alternatively, the different elements can be provided in separate formulations that are packaged or provided as a set or kit.

[0179] In some embodiments of any of the aspects, the enzyme(s) present in a composition, or combination, of the disclosure exhibit an increased utility that is not exhibited when said enzyme(s) occur alone or when said enzyme(s) are present at a naturally occurring concentration. In some embodiments of any of the aspects, compositions of the disclosure, comprising two or more enzyme(s) as taught herein, exhibit a synergistic effect on imparting at least one improved digestive trait in a patient. In some embodiments of any of the aspects, the compositions of the disclosure comprising one or more enzyme(s) as taught herein exhibit markedly different characteristics/properties compared to their closest naturally occurring counterpart. That is, the compositions of the disclosure exhibit markedly different functional and/or structural characteristics/properties, as compared to their closest naturally occurring counterpart. For instance, the enzyme(s) of the disclosure are structurally different from an enzyme(s) as it naturally exists in a source organism (e.g., a bacterium, yeast, or mammal), for at least the following reasons: said enzyme(s) can be isolated and purified, such that it is not found in the milieu of the source organism, said enzyme(s) can be present at concentrations that do not occur in the source organism, said enzyme(s) can be associated with acceptable carriers that do not occur in the source organism, said enzyme(s) can be formulated to be shelf-stable and exist outside the source organism environment, and said enzyme(s) can be combined with other enzyme(s) at concentrations that do not exist in the source organism. Further, the enzyme(s) of the disclosure are functionally different from an enzyme(s) as it naturally exists in a source organism, for at least the following reasons: said enzyme(s) when applied in an isolated and purified form can lead to improved digestion, said enzyme(s) can be formulated to be shelf-stable and able to exist outside the source organism environment, such that the enzyme(s) now has a new utility as a supplement capable of administration to a patient, wherein the enzyme(s) could not have such a utility in its natural state in the source organism, as the enzyme(s) would be unable to survive outside the source organism without the intervention of the hand of man to formulate the enzyme(s) into a shelf-stable state and impart this new utility that has the aforementioned functional characteristics not possessed by the enzyme(s) in its natural state of existence in the source organism.

[0180] In one aspect of any of the embodiments, provided herein is a nucleic acid comprising a sequence encoding one or more of: at least one fructan-degrading enzyme; at least one galactosidase; at least one sorbitol-degrading enzyme; at least one mannitol-degrading enzyme; at least one glucose isomerase; and at least one mannose isomerase; and at least one of: an operably linked heterologous promoter; and at least one codon optimized for expression in bacteria and/or yeast. In one aspect of any of the embodiments, provided herein is a nucleic acid comprising a sequence encoding one or more of: at least one fructan-degrading enzyme; at least one galactosidase; at least one sorbitol-degrading enzyme; and at least one mannitol-degrading enzyme; and at least one of: an operably linked heterologous promoter; and at least one codon optimized for expression in bacteria and/or yeast.

[0181] In one aspect of any of the embodiments, provided herein is a cell (e.g., a bacterial or yeast cell) comprising a nucleic acid comprising a sequence encoding one or more of: at least one fructan-degrading enzyme; at least one galactosidase; at least one sorbitol-degrading enzyme; at least one mannitol-degrading enzyme; at least one glucose isomerase; and at least one mannose isomerase; and at least one of: an operably linked heterologous promoter; and at least one codon optimized for expression in bacteria and/or yeast. In one aspect of any of the embodiments, provided herein is a cell (e.g., a bacterial or yeast cell) comprising nucleic acid comprising a sequence encoding one or more of: at least one fructan-degrading enzyme; at least one galactosidase; at least one sorbitol-degrading enzyme; and at least one mannitol-degrading enzyme; and at least one of: an operably linked heterologous promoter; and at least one codon optimized for expression in bacteria and/or yeast.

[0182] In some embodiments of any of the aspects, the nucleic acid is provided in a vector, e.g., an expression vector. The term “vector”, as used herein, refers to a nucleic acid construct designed for delivery to a host cell or for transfer between different host cells. As used herein, a vector can be viral or non-viral. The term “vector” encompasses any genetic element that is capable of replication when associated with the proper control elements and that can transfer gene sequences to cells. A vector can include, but is not limited to, a cloning vector, an expression vector, a plasmid, phage, transposon, cosmid, chromosome, virus, virion, etc.

[0183] As used herein, the term “expression vector” refers to a vector that directs expression of an RNA or polypeptide from sequences linked to transcriptional regulatory sequences on the vector. The sequences expressed will often, but not necessarily, be heterologous to the cell. An expression vector may comprise additional elements, for example, the expression vector may have two replication systems, thus allowing it to be maintained in two organisms, for example in human cells for expression and in a prokaryotic host for cloning and amplification. The term “expression” refers to the cellular processes involved in producing RNA and proteins and as appropriate, secreting proteins, including where applicable, but not limited to, for example, transcription, transcript processing, translation and protein folding, modification and processing. “Expression products” include RNA transcribed from a gene, and polypeptides obtained by translation of mRNA transcribed from a gene. The term “gene” means the nucleic acid sequence that is transcribed (DNA) to RNA in vitro or in vivo when operably linked to appropriate regulatory sequences. The gene may or may not include regions preceding and following the coding region, e.g. 5′ untranslated (5′UTR) or “leader” sequences and 3′ UTR or “trailer” sequences, as well as intervening sequences (introns) between individual coding segments (exons).

[0184] As used herein, the term “viral vector” refers to a nucleic acid vector construct that includes at least one element of viral origin and has the capacity to be packaged into a viral vector particle. The viral vector can contain the nucleic acid described herein, or portion thereof as described herein in place of non-essential viral genes. The vector and/or particle may be utilized for the purpose of transferring any nucleic acids into cells either in vitro or in vivo. Numerous forms of viral vectors are known in the art.

[0185] By “recombinant vector” is meant a vector that includes a heterologous nucleic acid sequence, or “transgene” that is capable of expression in vivo or in the transduced cells. It should be understood that the vectors described herein can, in some embodiments, be combined with other suitable compositions and therapies. In some embodiments of any of the aspects, the vector is episomal. The use of a suitable episomal vector provides a means of maintaining the nucleotide of interest in the subject in high copy number extra chromosomal DNA thereby eliminating potential effects of chromosomal integration.

[0186] In one aspect of any of the embodiments, described herein is a composition comprising an effective amount of an enzyme mixture including a subset or all of, but not limited to the following enzymes:
[0187] a) exo-inulinase obtained from a source such as but not limited to Aspergillus oryzae and Kluyveromyces marxianus
[0188] b) endo-inulinase obtained from a source such as but not limited to Aspergillus niger
[0189] c) mannitol dehydrogenase obtained from a source such as but not limited to Pseudomonas fluorescens, E. coli, Leuconostoc mesenteroides, and Gluconobacter oxydans, where “mannitol dehydrogenase” refers to any enzyme whose catalytic activity includes D-mannitol as substrate and D-fructose or D-mannose as product, and may include but is not limited to mannitol dehydrogenase, mannitol 2-dehydrogenase and mannitol dehydrogenase 2
[0190] d) sorbitol dehydrogenase obtained from a source such as but not limited to rat liver and sheep liver, where “sorbitol dehydrogenase” refers to any enzyme whose catalytic activity includes D-sorbitol as substrate and D-fructose as product and may include but is not limited to sorbitol dehydrogenase, sorbitol dehydrogenase 1, and sorbitol dehydrogenase 2
Embodiments which contain (a) and/or (b) of the list above are intended to hydrolyze fructan molecules found in foods and beverages during the consumption and digestion of such foods into more readily absorbable components (glucose and fructose). Embodiments which contain (c) of the list above are intended to convert mannitol into absorbable molecules (fructose and/or mannose). Embodiments which contain (d) of the list above are intended to convert sorbitol into absorbable fructose molecules. Embodiments of the present invention may hold more than one purpose, depending on the composition of enzymes appearing in the embodiment.

[0191] In some embodiments of any of the aspects, the composition described herein can contain auxiliary agents to support activity of the enzymes used in the composition including but not limited to metal ions (such as but not limited to Fe+3, Cu+3, and Mn+2), antacids, H2 antagonists, proton pump inhibitors, pepstatin protease inhibitors, other artificial protease inhibitors, and protease inhibitors naturally occurring in and extracted from foods such as but not limited to lima beans, soybeans, and chickpeas. Metal ions are demonstrated in scientific literature to potentially elevate enzymatic activity. Antacids can reduce symptoms of indigestion in users such as heartburn or dyspepsia. Antacids, H2 antagonists, and proton pump inhibitors can also increase the pH of the stomach, enabling the enzymes to activate closer to their optimal pH range (usually in the 4-8 range). Protease inhibitors may decrease the activity of endogenous proteases within the human gastrointestinal tract such as pepsin and trypsin, and prevent their cleavage and deactivation of the enzymes in the composition pertaining to the present invention. Additionally, in the scientific literature, it has been suggested that protease inhibition may lend therapeutic effects to individuals suffering from gastrointestinal conditions, including IBS, IBD, and SIBO. The composition may also contain additional enzymes not intended to act on fructan, mannitol, or sorbitol. These additional enzymes include but are not limited to glucose isomerase and mannose isomerase. In particular, glucose isomerase will convert excess fructose molecules produced by the reactions catalyzed by the enzymes in the embodiment’s composition into glucose molecules, which are digested more quickly by the body than fructose molecules, and as a result, shift the equilibrium of the aforementioned reactions to facilitate greater enzymatic activity. Similarly, mannose isomerase will convert excess mannose produced by the reactions catalyzed by mannitol dehydrogenase into fructose, which may consequently be converted into glucose by glucose isomerase present in the composition. Ultimately, the objective is to remove excess mannose via a series of conversions that transform the molecule into one that is quickly absorbed (glucose), to encourage higher enzymatic activity.

[0192] An embodiment may also contain a non-toxic and safe-for-consumption excipient, and may be produced in tablet (including chewable), capsule, soft-gel, thin-film, powder, or liquid or syrup form, but is not limited to such embodiments. The form that contains the composition may be in its entirety enteric-coated to reserve enzymatic activity for the intestinal tract, or contain a portion that is enteric-coated, so as to activate before reaching the small intestine but also release enzymes for continued activity in the intestinal tract. The composition may be mixed, blended, or mashed into food before ingestion, or be ingested in any of, but not limited to, the above forms in one or multiple doses or instances of administration within a period of time beginning 30 minutes prior to a meal and 30 minutes after a meal.

[0193] In some embodiments of any of the aspects, the composition is provided as a food, drink, or other nutritional product, e.g., a prepared or processed food or drink. It is contemplated that inclusion of the one or more enzymes described herein in the food, drink, or other product will provide dosing of a subject at the same time that the FODMAP is consumed, and/or reduce the FODMAP content of the food, drink, or other product. Exemplary but non-limiting exemples of foods, drinks, and other nutritional products include prepared foods including microwavable, ready-to-heat, ready-to-bake, or ready-to-serve soups, condiments, entrées, sides, salads, snacks, desserts (which may be canned, bottled, frozen, fresh, or in any format or packaging, but is not limited to packaged products); juice, jam, fruit-based beverages, teas, fruit sauces (including but not limited to apple sauce), canned fruit and vegetables, fermented fruits and vegetables (including but not limited to kimchi, sauerkraut), fruit and vegetable snacks (including but not limited to fruit leather, gummies, vegetable chips/fries/straws), smoothies, confectionaries (including but not limited to candy chews, marzipan, candy bars), dips and spread (including but not limited to hummus, guacamole), sauces (including but not limited to mayonnaise ketchup, salad dressings, mustard), marinades, nut butters, fruit or vegetable purées or pastes, nut milks, snack bars, bouillons, broth, soup base, seasonings, drink powders, beer, wine, liquor, prepared meats (including but not limited to pate, sausages, salami), breads, crackers, pastries (including but not limited to croissants, muffins, bagels), baking flours, baking mixes, any form of frozen dessert (including but not limited to popsicles, sorbets, ice cream); meal kits intended for preparation at home; and quick-cook packaged products (including but not limited to instant noodles, instant mac and cheese).

[0194] In one aspect of any of the embodiments, described herein is a method (e.g., a non-therapeutic method) of improving digestion, the method comprising consuming, or administering to a subject, the composition or combination described herein. In some embodiments of any of the aspects, a method of improving digestion is not a therapeutic method nor a method of medical treatment, as a method of improving digestion does not require that the subject have a pathological condition which is treated. In some embodiments of any of the non-therapeutic aspects, the subject is a healthy subject. In some embodiments of any of the non-therapeutic aspects, the subject does not have and/or is not diagnosed as having a medical condition affecting digestion.

[0195] In one aspect of any of the embodiments, described herein is a method of treating a digestive condition in a subject in need thereof, the method comprising administering to a subject, the composition or combination described herein. In one aspect of any of the embodiments, provided herein is the composition or combination described herein for use in a method of treating a digestive condition in a subject. In some embodiments of any of the aspects, administering can comprise directing the subject to consume the composition and/or combination.

[0196] As used herein, “digestive condition” refers to a condition in which digestion of one or more foods is impaired and/or causes symptoms of bloating, gas, nausea, abdominal pain, abdominal discomfort, diarrhea, and/or constipation. Exemplary but non-limiting digestive conditions can include Irritable Bowel Syndrome (IBS), Inflammatory Bowel Disease (IBD), non-celiac gluten sensitivity, small intestinal bacterial overgrowth (SIBO), small intestinal fungal overgrowth (SIFO) and/or allium intolerance. In some embodiments of any of the aspects, the subject is or is diagnosed as being sensitive to one or more FODMAPs.

[0197] Crohn’s disease and ulcerative colitis affect different regions of the intestines (also referred to herein as the bowels). For example, Crohn’s disease affects both the small intestine and the large intestine (also referred to herein as the colon); in Crohn’s disease, affected portions of the intestine are intermixed with healthy portions of the intestine; and Crohn’s disease can occur in all three layers of the bowel walls. As another example, ulcerative colitis affects only the colon; ulcerative colitis involves continuous inflammation of a majority of or the entire colon; and ulcerative colitis only affects the inner most lining of the colon.

[0198] Ulcerative colitis and Crohn’s disease can exhibit similar symptoms. For example, symptoms of ulcerative colitis or Crohn’s disease can comprise abdominal pain, diarrhea (sometimes bloody and/or containing mucus), bloating, abdominal cramps, urgency to have a bowel movement (defecate), anorexia, nausea/vomiting, constipation, and/or weight loss. As ulcerative colitis and Crohn’s disease can exhibit similar symptoms, doctors frequently cannot distinguish either disease by symptoms alone.

[0199] In some embodiments of any of the aspects, the method provides a decrease in bloating, gas, abdominal pain, abdominal discomfort, nausea, diarrhea, and/or constipation. In some embodiments of any of the aspects, the dose is a dose effective in providing a decrease in bloating, gas, nausea, abdominal pain, abdominal discomfort, diarrhea, and/or constipation.

[0200] In some embodiments of any of the aspects, the methods described herein relate to treating a subject having or diagnosed as having a digestive condition with a composition or combination as described herein. Subjects having a digestive condition can be identified by a physician using current methods of diagnosing a digestive condition.

[0201] The compositions and methods described herein can be administered to a subject having or diagnosed as having a digestive condition. In some embodiments of any of the aspects, the methods described herein comprise administering an effective amount of compositions described herein, e.g. a composition or combination, to a subject in order to alleviate a symptom of a digestive condition. As used herein, “alleviating a symptom” is ameliorating any condition or symptom associated with the digestive condition. As compared with an equivalent untreated control, such reduction is by at least 5%, 10%, 20%, 40%, 50%, 60%, 80%, 90%, 95%, 99% or more as measured by any standard technique. A variety of means for administering the compositions described herein to subjects are known to those of skill in the art.

[0202] The term “effective amount” as used herein refers to the amount of a composition or combination described herein needed to alleviate at least one or more symptom of the disease or disorder, and relates to a sufficient amount of pharmacological composition to provide the desired effect. The term “therapeutically effective amount” therefore refers to an amount of the active ingredient(s) that is sufficient to provide a particular effect when administered to a typical subject. An effective amount as used herein, in various contexts, would also include an amount sufficient to delay the development of a symptom of the disease, alter the course of a symptom disease (for example but not limited to, slowing the progression of a symptom of the disease), or reverse a symptom of the disease. Thus, it is not generally practicable to specify an exact “effective amount”. However, for any given case, an appropriate “effective amount” can be determined by one of ordinary skill in the art using only routine experimentation.

[0203] Effective amounts, toxicity, and therapeutic efficacy can be determined by standard pharmaceutical procedures in cell cultures or experimental animals, e.g., for determining the LD50 (the dose lethal to 50% of the population) and the ED50 (the dose therapeutically effective in 50% of the population). The dosage can vary depending upon the dosage form employed and the route of administration utilized. The dose ratio between toxic and therapeutic effects is the therapeutic index and can be expressed as the ratio LD50/ED50. Compositions and methods that exhibit large therapeutic indices are preferred. A therapeutically effective dose can be estimated initially from cell culture assays. Also, a dose can be formulated in animal models to achieve a circulating plasma concentration range that includes the IC50 (i.e., the concentration of the active ingredient(s), which achieves a half-maximal inhibition of symptoms) as determined in cell culture, or in an appropriate animal model. Levels in plasma can be measured, for example, by high performance liquid chromatography. The effects of any particular dosage can be monitored by a suitable assay or monitoring of symptoms. The dosage can be determined by a physician and adjusted, as necessary, to suit observed effects of the treatment.

[0204] In some embodiments of any of the aspects, the composition or combination described herein is administered as a monotherapy, e.g., another treatment for the digestive condition is not administered to the subject. In some embodiments of any of the aspects, the methods described herein can further comprise administering a second agent and/or treatment to the subject, e.g. as part of a combinatorial therapy.

[0205] In certain embodiments, an effective dose of a composition or combination as described herein can be administered to a patient once. In certain embodiments, an effective dose of a composition of a combination described herein can be administered to a patient repeatedly.

[0206] In some embodiments of any of the aspects, subjects can be administered a therapeutic amount of a composition or combination described herein, such as, e.g. 0.1 mg/kg, 0.5 mg/kg, 1.0 mg/kg, 2.0 mg/kg, 2.5 mg/kg, 5 mg/kg, 10 mg/kg, 15 mg/kg, 20 mg/kg, 25 mg/kg, 30 mg/kg, 40 mg/kg, 50 mg/kg, or more.

[0207] In some embodiments of any of the aspects, subjects can be administered a therapeutic amount of a composition or combination described herein, e.g., between 1 and 10,000,000 units of enzymatic activity for each enzyme per dose. In some embodiments of any of the aspects, the therapeutic amount of a composition or combination described herein comprises between 1 and 2,000,000 units of enzymatic activity for each enzyme per dose. In some embodiments of any of the aspects, the therapeutic amount of a composition or combination described herein comprises between 1 and 1,000,000 units of enzymatic activity for each enzyme per dose.. In some embodiments of any of the aspects, the therapeutic amount of a composition or combination described herein comprises between 1 and 500,000 units of enzymatic activity for each enzyme per dose. In some embodiments of any of the aspects . In some embodiments of any of the aspects, the therapeutic amount of a composition or combination described herein comprises between 1 and 200,000 units of enzymatic activity for each enzyme per dose. In some embodiments of any of the aspects, In some embodiments of any of the aspects, the therapeutic amount of a composition or combination described herein comprises between 1 and 100,000 units of enzymatic activity for each enzyme per dose. In some embodiments of any of the aspects, the therapeutic amount of a composition or combination described herein comprises between 500 and 1,000,000 units of enzymatic activity for each enzyme per dose.. In some embodiments of any of the aspects, the therapeutic amount of a composition or combination described herein comprises between 500 and 500,000 units of enzymatic activity for each enzyme per dose. In some embodiments of any of the aspects,

[0208] Units of enzymatic activity can be defined as:
[0209] a. One Unit of exo-inulinase activity is defined as the amount of enzyme required to release one µmole of β-D-fructose reducing-sugar equivalents per minute from kestose (5 mg/mL) in sodium acetate buffer (100 mM), at pH 4.5 at 40° C.
[0210] b. One Unit of endo-inulinase activity is defined as the amount of enzyme required to release one µmole of β-D-fructose reducing-sugar equivalents per minute from inulin (20 mg/mL) in sodium acetate buffer (100 mM), pH 4.5.
[0211] c. Glucose isomerase: one unit converts glucose to fructose at an initial rate of 1 µmole per min
[0212] d. One Unit of mannitol dehydrogenase is defined as the amount of enzyme required to produce one µmole of NADH from NAD+ in the presence of D-mannitol (5.2 mM) in Tris-HCl buffer (64 mM), pH 8.6 at 40° C.
[0213] e. One unit (U) sorbitol dehydrogenase will reduce 1 mol of D-fructose in one minute at +25° C. and pH 7.6 [triethanolamine buffer; 150 mM fructose (nonsaturating concentration)].
[0214] f. Unit definition of Mannitol Oxidase = One unit will oxidize 1.0 µmole of D-mannitol to D-mannose and H₂O₂ per minute at pH 5.1 at 35° C.
[0215] g. Unit definition of Sorbitol Oxidase = One unit will oxidize 1.0 µmole of D-sorbitol to D-glucose and H₂O₂ per minute at pH 5.1 at 35° C.

[0216] In some embodiments of any of the aspects, the therapeutic amount of a composition or combination described herein comprises between 10 and 100,000 units of glucose isomerase activity per dose. In some embodiments of any of the aspects, the therapeutic amount of a composition or combination described herein comprises between 100 and 10,000 units of glucose isomerase activity per dose. In some embodiments of any of the aspects, the therapeutic amount of a composition or combination described herein comprises between 500 and 5,000 units of glucose isomerase activity per dose.

[0217] In some embodiments of any of the aspects, the therapeutic amount of a composition or combination described herein comprises between 50 and 500,000 units of galactosidase activity per dose. In some embodiments of any of the aspects, the therapeutic amount of a composition or combination described herein comprises between 500 and 50,000 units of galactosidase activity per dose. In some embodiments of any of the aspects, the therapeutic amount of a composition or combination described herein comprises between 1,000 and 10,000 units of galactosidase activity per dose. In some embodiments of any of the aspects, the therapeutic amount of a composition or combination described herein comprises between 2,000 and 10,000 units of galactosidase activity per dose. In some embodiments of any of the aspects, the therapeutic amount of a composition or combination described herein comprises between 3,000 and 10,000 units of galactosidase activity per dose. In some embodiments of any of the aspects, the therapeutic amount of a composition or combination described herein comprises between 4,000 and 10,000 units of galactosidase activity per dose. In some embodiments of any of the aspects, the therapeutic amount of a composition or combination described herein comprises between 5,000 and 10,000 units of galactosidase activity per dose. In some embodiments of any of the aspects, the therapeutic amount of a composition or combination described herein comprises at least 2,000 units of galactosidase activity per dose. In some embodiments of any of the aspects, the therapeutic amount of a composition or combination described herein comprises at least 3,000 units of galactosidase activity per dose. In some embodiments of any of the aspects, the therapeutic amount of a composition or combination described herein comprises at least 4,000 units of galactosidase activity per dose. In some embodiments of any of the aspects, the therapeutic amount of a composition or combination described herein comprises at least 5,000 units of galactosidase activity per dose.

[0218] In some embodiments of any of the aspects, the therapeutic amount of a composition or combination described herein comprises between 800 and 8,000,000 units of fructan-degrading enzyme activity (e.g., exo-inulinase activity) per dose. In some embodiments of any of the aspects, the therapeutic amount of a composition or combination described herein comprises between 8,000 and 800,000 units of fructan-degrading enzyme activity (e.g., exo-inulinase activity) per dose. In some embodiments of any of the aspects, the therapeutic amount of a composition or combination described herein comprises between 4,000 and 400,000 units of fructan-degrading enzyme activity (e.g., exo-inulinase activity) per dose. In some embodiments of any of the aspects, the therapeutic amount of a composition or combination described herein comprises between 1,000 and 10,000 units of fructan-degrading enzyme activity (e.g., exo-inulinase activity) per dose. In some embodiments of any of the aspects, the therapeutic amount of a composition or combination described herein comprises between 1,000 and 20,000 units of fructan-degrading enzyme activity (e.g., exo-inulinase activity) per dose.

[0219] In some embodiments of any of the aspects, the therapeutic amount of a composition or combination described herein comprises between 100 and 500,000 units of lactase activity per dose. In some embodiments of any of the aspects, the therapeutic amount of a composition or combination described herein comprises between 1,000 and 100,000 units of lactase activity per dose. In some embodiments of any of the aspects, the therapeutic amount of a composition or combination described herein comprises between 10,000 and 50,000 units of lactase activity per dose. In some embodiments of any of the aspects, the therapeutic amount of a composition or combination described herein comprises between 15,000 and 50,000 units of lactase activity per dose. In some embodiments of any of the aspects, the therapeutic amount of a composition or combination described herein comprises at least 10,000 units of lactase activity per dose. In some embodiments of any of the aspects, the therapeutic amount of a composition or combination described herein comprises at least 12,000 units of lactase activity per dose. In some embodiments of any of the aspects, the therapeutic amount of a composition or combination described herein comprises at least 15,000 units of lactase activity per dose. In some embodiments of any of the aspects, the therapeutic amount of a composition or combination described herein comprises at least 20,000 units of lactase activity per dose.

[0220] In some embodiments of any of the aspects, after an initial treatment regimen, the treatments can be administered on a less frequent basis. For example, after treatment biweekly for three months, treatment can be repeated once per month, for six months or a year or longer. Treatment according to the methods described herein can reduce levels of a marker or symptom of a condition, e.g. bloating, gas, constipation, etc. by at least 10%, at least 15%, at least 20%, at least 25%, at least 30%, at least 40%, at least 50%, at least 60%, at least 70%, at least 80 % or at least 90% or more.

[0221] In some embodiments of any of the aspects, consumption or administration occurs within 30 minutes of consumption of a meal, or consumption of other food or drink. In some embodiments of any of the aspects, consumption or administration occurs within 30 minutes (e.g., within 20 minutes or within 10 minutes) prior to consumption of a meal, or consumption of other food or drink. In some embodiments of any of the aspects, consumption or administration occurs at least partially during consumption of a meal, or consumption of other food or drink.

[0222] The dosage of a composition as described herein can be determined by a physician and adjusted, as necessary, to suit observed effects of the treatment. With respect to duration and frequency of treatment, it is typical for skilled clinicians to monitor subjects in order to determine when the treatment is providing therapeutic benefit, and to determine whether to increase or decrease dosage, increase or decrease administration frequency, discontinue treatment, resume treatment, or make other alterations to the treatment regimen. The dosing schedule can vary from once a week to daily depending on a number of clinical factors, such as the subject’s sensitivity to the active ingredient(s). The desired dose or amount of activation can be administered at one time or divided into sub doses, e.g., 2-4 sub doses and administered over a period of time, e.g., at appropriate intervals through the day or other appropriate schedule. In some embodiments of any of the aspects, administration can be chronic, e.g., one or more doses and/or treatments daily over a period of weeks or months. Examples of dosing and/or treatment schedules are administration daily, twice daily, three times daily or four or more times daily over a period of 1 week, 2 weeks, 3 weeks, 4 weeks, 1 month, 2 months, 3 months, 4 months, 5 months, or 6 months, or more. A composition or combination can be administered over a period of time, such as over a 5 minute, 10 minute, 15 minute, 20 minute, or 25 minute period.

[0223] The dosage ranges for the administration of composition and combinations according to the methods described herein depend upon, for example, the form of the active ingredient(s), its potency, and the extent to which symptoms, markers, or indicators of a condition described herein are desired to be reduced, for example the percentage reduction desired for bloating, gas, constipation, etc. The dosage should not be so large as to cause adverse side effects. Generally, the dosage will vary with the age, condition, and sex of the patient and can be determined by one of skill in the art. The dosage can also be adjusted by the individual physician in the event of any complication.

[0224] The efficacy of a composition or combination in, e.g. the treatment of a condition described herein, or to induce a response as described herein can be determined by the skilled clinician. However, a treatment is considered “effective treatment,” as the term is used herein, if one or more of the signs or symptoms of a condition described herein are altered in a beneficial manner, other clinically accepted symptoms are improved, or even ameliorated, or a desired response is induced e.g., by at least 10% following treatment according to the methods described herein. Efficacy can be assessed, for example, by measuring a marker, indicator, symptom, and/or the incidence of a condition treated according to the methods described herein or any other measurable parameter appropriate. Efficacy can also be measured by a failure of an individual to worsen as assessed by hospitalization, or need for medical interventions (i.e., progression of the disease is halted). Methods of measuring these indicators are known to those of skill in the art and/or are described herein. Treatment includes any treatment of a disease in an individual or an animal (some non-limiting examples include a human or an animal) and includes: (1) inhibiting the disease, e.g., preventing a worsening of symptoms (e.g. pain or inflammation); or (2) relieving the severity of the disease, e.g., causing regression of symptoms. An effective amount for the treatment of a disease means that amount which, when administered to a subject in need thereof, is sufficient to result in effective treatment as that term is defined herein, for that disease. Efficacy of an agent can be determined by assessing physical indicators of a condition or desired response. It is well within the ability of one skilled in the art to monitor efficacy of administration and/or treatment by measuring any one of such parameters, or any combination of parameters. Efficacy can be assessed in animal models of a condition described herein, for example treatment of a mouse model of a digestive condition. When using an experimental animal model, efficacy of treatment is evidenced when a statistically significant change in a marker is observed, e.g. gas, bloating, constipation, or percent of one or more compounds digested.

[0225] The polypeptides (e.g., enzymes) of the present invention can be synthesized by using well known methods including recombinant methods and chemical synthesis. Recombinant methods of producing a polypeptide through the introduction of a vector including nucleic acid encoding the polypeptide into a suitable host cell are well known in the art, e.g., as described in Sambrook et al., Molecular Cloning: A Laboratory Manual, 2d Ed, Vols 1 to 8, Cold Spring Harbor, NY (1989); M.W. Pennington and B.M. Dunn, Methods in Molecular Biology: Peptide Synthesis Protocols, Vol 35, Humana Press, Totawa, NJ (1994), contents of both of which are herein incorporated by reference. Peptides can also be chemically synthesized using methods well known in the art. See for example, Merrifield et al., J. Am. Chem. Soc. 85:2149 (1964); Bodanszky, M., Principles of Peptide Synthesis, Springer-Verlag, New York, NY (1984); Kimmerlin, T. and Seebach, D. J. Pept. Res. 65:229-260 (2005); Nilsson et al., Annu. Rev. Biophys. Biomol. Struct. (2005) 34:91-118; W.C. Chan and P.D. White (Eds.) Fmoc Solid Phase Peptide Synthesis: A Practical Approach, Oxford University Press, Cary, NC (2000); N.L. Benoiton, Chemistry of Peptide Synthesis, CRC Press, Boca Raton, FL (2005); J. Jones, Amino Acid and Peptide Synthesis, 2^{nd} Ed, Oxford University Press, Cary, NC (2002); and P. Lloyd-Williams, F. Albericio, and E. Giralt, Chemical Approaches to the synthesis of peptides and proteins, CRC Press, Boca Raton, FL (1997), contents of all of which are herein incorporated by reference. Peptide derivatives can also be prepared as described in U.S. Pat. Nos. 4,612,302; 4,853,371; and 4,684,620, and U.S. Pat. App. Pub. No. 2009/0263843, contents of all which are herein incorporated by reference.

[0226] In some embodiments of any of the aspects, a polypeptide “obtained from” a specified organism refers to a polypeptide (e.g., an enzyme) isolated by physical or chemical means from that organism, e.g., purified in polypeptide from one or more cells of that organism. In some embodiments of any of the aspects, a polypeptide having the sequence of a reference polypeptide of a specified organism(s) refers to a polypeptide (e.g., an enzyme) produced or obtained by any means or source that comprises the same polypeptide sequence as a reference polypeptide produced by the specified organism, e.g., the polypeptide could be recombinantly produced.

[0227] For convenience, the meaning of some terms and phrases used in the specification, examples, and appended claims, are provided below. Unless stated otherwise, or implicit from context, the following terms and phrases include the meanings provided below. The definitions are provided to aid in describing particular embodiments, and are not intended to limit the claimed invention, because the scope of the invention is limited only by the claims. Unless otherwise defined, all technical and scientific terms used herein have the same meaning as commonly understood by one of ordinary skill in the art to which this invention belongs. If there is an apparent discrepancy between the usage of a term in the art and its definition provided herein, the definition provided within the specification shall prevail.

[0228] For convenience, certain terms employed herein, in the specification, examples and appended claims are collected here.

[0229] The terms “decrease”, “reduced”, “reduction”, or “inhibit” are all used herein to mean a decrease by a statistically significant amount. In some embodiments of any of the aspects, “reduce,” “reduction” or “decrease” or “inhibit” typically means a decrease by at least 10% as compared to a reference level (e.g. the absence of a given treatment or agent) and can include, for example, a decrease by at least about 10%, at least about 20%, at least about 25%, at least about 30%, at least about 35%, at least about 40%, at least about 45%, at least about 50%, at least about 55%, at least about 60%, at least about 65%, at least about 70%, at least about 75%, at least about 80%, at least about 85%, at least about 90%, at least about 95%, at least about 98%, at least about 99%, or more. As used herein, “reduction” or “inhibition” does not encompass a complete inhibition or reduction as compared to a reference level. “Complete inhibition” is a 100% inhibition as compared to a reference level. A decrease can be preferably down to a level accepted as within the range of normal for an individual without a given disorder.

[0230] The terms “increased”, “increase”, “enhance”, or “activate” are all used herein to mean an increase by a statically significant amount. In some embodiments of any of the aspects, the terms “increased”, “increase”, “enhance”, or “activate” can mean an increase of at least 10% as compared to a reference level, for example an increase of at least about 20%, or at least about 30%, or at least about 40%, or at least about 50%, or at least about 60%, or at least about 70%, or at least about 80%, or at least about 90% or up to and including a 100% increase or any increase between 10-100% as compared to a reference level, or at least about a 2-fold, or at least about a 3-fold, or at least about a 4-fold, or at least about a 5-fold or at least about a 10-fold increase, or any increase between 2-fold and 10-fold or greater as compared to a reference level. In the context of a marker or symptom, an “increase” is a statistically significant increase in such level.

[0231] As used herein, a “subject” means a human or animal. Usually the animal is a vertebrate such as a primate, rodent, domestic animal or game animal. Primates include chimpanzees, cynomolgus monkeys, spider monkeys, and macaques, e.g., Rhesus. Rodents include mice, rats, woodchucks, ferrets, rabbits and hamsters. Domestic and game animals include cows, horses, pigs, deer, bison, buffalo, feline species, e.g., domestic cat, canine species, e.g., dog, fox, wolf, avian species, e.g., chicken, emu, ostrich, and fish, e.g., trout, catfish and salmon. In some embodiments of any of the aspects, the subject is a mammal, e.g., a primate, e.g., a human. The terms, “individual,” “patient” and “subject” are used interchangeably herein.

[0232] Preferably, the subject is a mammal. The mammal can be a human, non-human primate, mouse, rat, dog, cat, horse, or cow, but is not limited to these examples. Mammals other than humans can be advantageously used as subjects that represent animal models of digestion and/or a digestive condition. A subject can be male or female.

[0233] A subject can be one who has been previously diagnosed with or identified as suffering from or having a condition in need of treatment (e.g. a digestive condition) or one or more complications related to such a condition, and optionally, have already undergone treatment for the condition or the one or more complications related to the condition. Alternatively, a subject can also be one who has not been previously diagnosed as having the condition or one or more complications related to the condition. For example, a subject can be one who exhibits one or more risk factors for the condition or one or more complications related to the condition or a subject who does not exhibit risk factors.

[0234] A “subject in need” of treatment for a particular condition can be a subject having that condition, diagnosed as having that condition, or at risk of developing that condition.

[0235] As used herein, the terms “protein” and “polypeptide” are used interchangeably herein to designate a series of amino acid residues, connected to each other by peptide bonds between the alpha-amino and carboxy groups of adjacent residues. The terms “protein”, and “polypeptide” refer to a polymer of amino acids, including modified amino acids (e.g., phosphorylated, glycated, glycosylated, etc.) and amino acid analogs, regardless of its size or function. “Protein” and “polypeptide” are often used in reference to relatively large polypeptides, whereas the term “peptide” is often used in reference to small polypeptides, but usage of these terms in the art overlaps. The terms “protein” and “polypeptide” are used interchangeably herein when referring to a gene product and fragments thereof. Thus, exemplary polypeptides or proteins include gene products, naturally occurring proteins, homologs, orthologs, paralogs, fragments and other equivalents, variants, fragments, and analogs of the foregoing. The terms also refer to fragments or variants of the polypeptide that maintain at least 50% of the activity or effect, e.g. of the wild-type polypeptide, e.g., as described herein. Conservative substitution variants that maintain the activity of wildtype enzymes will include a conservative substitution as defined herein. The identification of amino acids most likely to be tolerant of conservative substitution while maintaining at least 50% of the activity of the wildtype is guided by, for example, sequence alignment with homologs or paralogs from other species. Amino acids that are identical between homologs are less likely to tolerate change, while those showing conservative differences are obviously much more likely to tolerate conservative change in the context of an artificial variant. Similarly, positions with non-conservative differences are less likely to be critical to function and more likely to tolerate conservative substitution in an artificial variant. Variants, fragments, and/or fusion proteins can be tested for activity, for example, by administering the variant to an appropriate animal model of digestion and/or a digestive condition as described herein.

[0236] In some embodiments of any of the aspects, a polypeptide (e.g. an enzyme), can be a variant of a sequence described herein. In some embodiments of any of the aspects, the variant is a conservative substitution variant. Variants can be obtained by mutations of native nucleotide sequences, for example. A “variant,” as referred to herein, is a polypeptide substantially homologous to a native or reference polypeptide, but which has an amino acid sequence different from that of the native or reference polypeptide because of one or a plurality of deletions, insertions or substitutions. Polypeptide-encoding DNA sequences encompass sequences that comprise one or more additions, deletions, or substitutions of nucleotides when compared to a native or reference DNA sequence, but that encode a variant protein or fragment thereof that retains the relevant biological activity relative to the reference protein. As to amino acid sequences, one of skill will recognize that individual substitutions, deletions or additions to a nucleic acid, peptide, polypeptide, or protein sequence which alters a single amino acid or a small percentage, (i.e. 5% or fewer, e.g. 4% or fewer, or 3% or fewer, or 1% or fewer) of amino acids in the encoded sequence is a “conservatively modified variant” where the alteration results in the substitution of an amino acid with a chemically similar amino acid. It is contemplated that some changes can potentially improve the relevant activity, such that a variant, whether conservative or not, has more than 100% of the activity of the wildtype enzyme, e.g. 110%, 125%, 150%, 175%, 200%, 500%, 1000% or more.

[0237] One method of identifying amino acid residues which can be substituted is to align, for example, a reference sequence to a homolog from one or more different species. Alignment can provide guidance regarding not only residues likely to be necessary for function but also, conversely, those residues likely to tolerate change. Where, for example, an alignment shows two identical or similar amino acids at corresponding positions, it is more likely that that site is important functionally. Where, conversely, alignment shows residues in corresponding positions to differ significantly in size, charge, hydrophobicity, etc., it is more likely that that site can tolerate variation in a functional polypeptide. The variant amino acid or DNA sequence can be at least 90%, at least 95%, at least 96%, at least 97%, at least 98%, at least 99%, or more, identical to a native or reference sequence. The degree of homology (percent identity) between a native and a mutant sequence can be determined, for example, by comparing the two sequences using freely available computer programs commonly employed for this purpose on the world wide web. The variant amino acid or DNA sequence can be at least 90%, at least 91%, at least 92%, at least 93%, at least 94%, at least 95%, at least 96%, at least 97%, at least 98%, at least 99%, or more, similar to the sequence from which it is derived (referred to herein as an “original” sequence). The degree of similarity (percent similarity) between an original and a mutant sequence can be determined, for example, by using a similarity matrix. Similarity matrices are well known in the art and a number of tools for comparing two sequences using similarity matrices are freely available online, e.g. BLASTp or BLASTn (available on the world wide web at blast.ncbi.nlm.nih.gov), with default parameters set.

[0238] In the various embodiments described herein, it is further contemplated that variants (naturally occurring or otherwise), alleles, homologs, conservatively modified variants, and/or conservative substitution variants of any of the particular polypeptides described are encompassed. As to amino acid sequences, one of skill will recognize that individual substitutions, deletions or additions to a nucleic acid, peptide, polypeptide, or protein sequence which alters a single amino acid or a small percentage of amino acids in the encoded sequence is a “conservatively modified variant” where the alteration results in the substitution of an amino acid with a chemically similar amino acid and retains the desired activity of the polypeptide. Such conservatively modified variants are in addition to and do not exclude polymorphic variants, interspecies homologs, and alleles consistent with the disclosure.

[0239] A given amino acid can be replaced by a residue having similar physiochemical characteristics, e.g., substituting one aliphatic residue for another (such as Ile, Val, Leu, or Ala for one another), or substitution of one polar residue for another (such as between Lys and Arg; Glu and Asp; or Gln and Asn). Other such conservative substitutions, e.g., substitutions of entire regions having similar hydrophobicity characteristics, are well known. Polypeptides comprising conservative amino acid substitutions can be tested in any one of the assays described herein to confirm that a desired activity and specificity of a native or reference polypeptide is retained.

[0240] A given amino acid can be replaced by a residue having similar physiochemical characteristics, e.g., substituting one aliphatic residue for another (such as Ile, Val, Leu, or Ala for one another), or substitution of one polar residue for another (such as between Lys and Arg; Glu and Asp; or Gln and Asn). Other such conservative substitutions, e.g., substitutions of entire regions having similar hydrophobicity characteristics, are well known. Polypeptides comprising conservative amino acid substitutions can be tested in any one of the assays described herein to confirm that a desired activity of a native or reference polypeptide is retained. Conservative substitution tables providing functionally similar amino acids are well known in the art. Such conservatively modified variants are in addition to and do not exclude polymorphic variants, interspecies homologs, and alleles consistent with the disclosure.

[0241] Amino acids can be grouped according to similarities in the properties of their side chains (in A. L. Lehninger, in Biochemistry, second ed., pp. 73-75, Worth Publishers, New York (1975)): (1) non-polar: Ala (A), Val (V), Leu (L), Ile (I), Pro (P), Phe (F), Trp (W), Met (M); (2) uncharged polar: Gly (G), Ser (S), Thr (T), Cys (C), Tyr (Y), Asn (N), Gln (Q); (3) acidic: Asp (D), Glu (E); (4) basic: Lys (K), Arg (R), His (H). Alternatively, naturally occurring residues can be divided into groups based on common side-chain properties: (1) hydrophobic: Norleucine, Met, Ala, Val, Leu, Ile; (2) neutral hydrophilic: Cys, Ser, Thr, Asn, Gln; (3) acidic: Asp, Glu; (4) basic: His, Lys, Arg; (5) residues that influence chain orientation: Gly, Pro; (6) aromatic: Trp, Tyr, Phe. Non-conservative substitutions will entail exchanging a member of one of these classes for another class. Particular conservative substitutions include, for example; Ala into Gly or into Ser; Arg into Lys; Asn into Gln or into His; Asp into Glu; Cys into Ser; Gln into Asn; Glu into Asp; Gly into Ala or into Pro; His into Asn or into Gln; Ile into Leu or into Val; Leu into Ile or into Val; Lys into Arg, into Gln or into Glu; Met into Leu, into Tyr or into Ile; Phe into Met, into Leu or into Tyr; Ser into Thr; Thr into Ser; Trp into Tyr; Tyr into Trp; and/or Phe into Val, into Ile or into Leu. Typically conservative substitutions for one another also include: 1) Alanine (A), Glycine (G); 2) Aspartic acid (D), Glutamic acid (E); 3) Asparagine (N), Glutamine (Q); 4) Arginine (R), Lysine (K); 5) Isoleucine (I), Leucine (L), Methionine (M), Valine (V); 6) Phenylalanine (F), Tyrosine (Y), Tryptophan (W); 7) Serine (S), Threonine (T); and 8) Cysteine (C), Methionine (M) (see, e.g., Creighton, Proteins (1984)).

[0242] In some embodiments of any of the aspects, the polypeptide described herein (or a nucleic acid encoding such a polypeptide) can be a functional fragment of one of the amino acid sequences described herein. As used herein, a “functional fragment” is a fragment or segment of a peptide which retains at least 50% of the wildtype reference polypeptide’s activity according to the assays described below herein. A functional fragment can comprise conservative substitutions of the sequences disclosed herein.

[0243] In some embodiments of any of the aspects, the polypeptide described herein can be a variant of a sequence described herein. In some embodiments of any of the aspects, the variant is a conservatively modified variant. Conservative substitution variants can be obtained by mutations of native nucleotide sequences, for example. A “variant,” as referred to herein, is a polypeptide substantially homologous to a native or reference polypeptide, but which has an amino acid sequence different from that of the native or reference polypeptide because of one or a plurality of deletions, insertions or substitutions. Variant polypeptide-encoding DNA sequences encompass sequences that comprise one or more additions, deletions, or substitutions of nucleotides when compared to a native or reference DNA sequence, but that encode a variant protein or fragment thereof that retains activity. A wide variety of PCR-based site-specific mutagenesis approaches are known in the art and can be applied by the ordinarily skilled artisan.

[0244] In some embodiments of any of the aspects, a polypeptide (e.g. enzyme) can comprise one or more amino acid substitutions or modifications. In some embodiments of any of the aspects, the substitutions and/or modifications can prevent or reduce proteolytic degradation and/or prolong half-life of the polypeptide in a subject. In some embodiments of any of the aspects, a polypeptide can be modified by conjugating or fusing it to other polypeptide or polypeptide domains such as, by way of non-limiting example, transferrin (WO06096515A2), albumin (Yeh et al., 1992), growth hormone (US2003104578AA); cellulose (Levy and Shoseyov, 2002); and/or Fc fragments (Ashkenazi and Chamow, 1997). The references in the foregoing paragraph are incorporated by reference herein in their entireties.

[0245] In some embodiments of any of the aspects, a polypeptide, e.g., an enzyme, as described herein can comprise at least one peptide bond replacement. A polypeptide as described herein can comprise one type of peptide bond replacement or multiple types of peptide bond replacements, e.g. 2 types, 3 types, 4 types, 5 types, or more types of peptide bond replacements. Non-limiting examples of peptide bond replacements include urea, thiourea, carbamate, sulfonyl urea, trifluoroethylamine, ortho-(aminoalkyl)-phenylacetic acid, para-(aminoalkyl)-phenylacetic acid, meta-(aminoalkyl)-phenylacetic acid, thioamide, tetrazole, boronic ester, olefinic group, and derivatives thereof.

[0246] In some embodiments of any of the aspects, a polypeptide, e.g., an enzyme, as described herein can comprise naturally occurring amino acids commonly found in polypeptides and/or proteins produced by living organisms, e.g. Ala (A), Val (V), Leu (L), Ile (I), Pro (P), Phe (F), Trp (W), Met (M), Gly (G), Ser (S), Thr (T), Cys (C), Tyr (Y), Asn (N), Gln (Q), Asp (D), Glu (E), Lys (K), Arg (R), and His (H). In some embodiments of any of the aspects, a polypeptide as described herein can comprise alternative amino acids. Non-limiting examples of alternative amino acids include, D-amino acids; beta-amino acids; homocysteine, phosphoserine, phosphothreonine, phosphotyrosine, hydroxyproline, gamma-carboxyglutamate; hippuric acid, octahydroindole-2-carboxylic acid, statine, 1,2,3,4,-tetrahydroisoquinoline-3-carboxylic acid, penicillamine (3-mercapto-D-valine), ornithine, citruline, alpha-methyl-alanine, para-benzoylphenylalanine, para-amino phenylalanine, p-fluorophenylalanine, phenylglycine, propargylglycine, sarcosine, and tert-butylglycine), diaminobutyric acid, 7-hydroxy-tetrahydroisoquinoline carboxylic acid, naphthylalanine, biphenylalanine, cyclohexylalanine, amino-isobutyric acid, norvaline, norleucine, tert-leucine, tetrahydroisoquinoline carboxylic acid, pipecolic acid, phenylglycine, homophenylalanine, cyclohexylglycine, dehydroleucine, 2,2-diethylglycine, 1-amino-1-cyclopentanecarboxylic acid, 1-amino-1-cyclohexanecarboxylic acid, amino-benzoic acid, amino-naphthoic acid, gamma-aminobutyric acid, difluorophenylalanine, nipecotic acid, alpha-amino butyric acid, thienyl-alanine, t-butylglycine, trifluorovaline; hexafluoroleucine; fluorinated analogs; azide-modified amino acids; alkyne-modified amino acids; cyano-modified amino acids; and derivatives thereof.

[0247] In some embodiments of any of the aspects, a polypeptide, e.g. an enzyme, can be modified, e.g. by addition of a moiety to one or more of the amino acids that together comprise the peptide. In some embodiments of any of the aspects, a polypeptide as described herein can comprise one or more moiety molecules, e.g. 1 or more moiety molecules per polypeptide, 2 or more moiety molecules per polypeptide, 5 or more moiety molecules per polypeptide, 10 or more moiety molecules per polypeptide or more moiety molecules per polypeptide. In some embodiments of any of the aspects, a polypeptide as described herein can comprise one more types of modifications and/or moieties, e.g. 1 type of modification, 2 types of modifications, 3 types of modifications or more types of modifications. Non-limiting examples of modifications and/or moieties include PEGylation; glycosylation; HESylation; ELPylation; lipidation; acetylation; amidation; end-capping modifications; cyano groups; phosphorylation; albumin, and cyclization. In some embodiments of any of the aspects, an end-capping modification can comprise acetylation at the N-terminus, N-terminal acylation, and N-terminal formylation. In some embodiments of any of the aspects, an end-capping modification can comprise amidation at the C-terminus, introduction of C-terminal alcohol, aldehyde, ester, and thioester moieties. The half-life of a polypeptide can be increased by the addition of moieties, e.g. PEG, albumin, or other fusion partners (e.g. Fc fragment of an immunoglobin).

[0248] Any cysteine residue not involved in maintaining the proper conformation of the polypeptide also can be substituted, generally with serine, to improve the oxidative stability of the molecule and prevent aberrant crosslinking. Conversely, cysteine bond(s) can be added to the polypeptide to improve its stability or facilitate oligomerization.

[0249] Alterations of the native amino acid sequence can be accomplished by any of a number of techniques known to one of skill in the art. Mutations can be introduced, for example, at particular loci by synthesizing oligonucleotides containing a mutant sequence, flanked by restriction sites enabling ligation to fragments of the native sequence. Following ligation, the resulting reconstructed sequence encodes an analog having the desired amino acid insertion, substitution, or deletion. Alternatively, oligonucleotide-directed site-specific mutagenesis procedures can be employed to provide an altered nucleotide sequence having particular codons altered according to the substitution, deletion, or insertion required. Techniques for making such alterations are very well established.Alterations of the original amino acid sequence can be accomplished by any of a number of techniques known to one of skill in the art. Mutations can be introduced, for example, at particular loci by synthesizing oligonucleotides containing a mutant sequence, flanked by restriction sites permitting ligation to fragments of the native sequence. Following ligation, the resulting reconstructed sequence encodes an analog having the desired amino acid insertion, substitution, or deletion. Alternatively, oligonucleotide-directed site-specific mutagenesis procedures can be employed to provide an altered nucleotide sequence having particular codons altered according to the substitution, deletion, or insertion required. Techniques for making such alterations include those disclosed by Khudyakov et al. “Artificial DNA: Methods and Applications” CRC Press, 2002; Braman “In Vitro Mutagenesis Protocols” Springer, 2004; and Rapley “The Nucleic Acid Protocols Handbook” Springer 2000; which are herein incorporated by reference in their entireties. In some embodiments of any of the aspects, a polypeptide as described herein can be chemically synthesized and mutations can be incorporated as part of the chemical synthesis process.

[0250] As used herein, the term “nucleic acid” or “nucleic acid sequence” refers to any molecule, preferably a polymeric molecule, incorporating units of ribonucleic acid, deoxyribonucleic acid or an analog thereof. The nucleic acid can be either single-stranded or double-stranded. A single-stranded nucleic acid can be one nucleic acid strand of a denatured double- stranded DNA. Alternatively, it can be a single-stranded nucleic acid not derived from any double-stranded DNA. In one aspect, the nucleic acid can be DNA. In another aspect, the nucleic acid can be RNA. Suitable DNA can include, e.g., genomic DNA or cDNA. Suitable RNA can include, e.g., mRNA.

[0251] The term “expression” refers to the cellular processes involved in producing RNA and proteins and as appropriate, secreting proteins, including where applicable, but not limited to, for example, transcription, transcript processing, translation and protein folding, modification and processing. Expression can refer to the transcription and stable accumulation of sense (mRNA) or antisense RNA derived from a nucleic acid fragment or fragments of the invention and/or to the translation of mRNA into a polypeptide.

[0252] “Operably linked” refers to an arrangement of elements wherein the components so described are configured so as to perform their usual function. Thus, control elements operably linked to a coding sequence are capable of effecting the expression of the coding sequence. The control elements need not be contiguous with the coding sequence, so long as they function to direct the expression thereof. Thus, for example, intervening untranslated yet transcribed sequences can be present between a promoter sequence and the coding sequence and the promoter sequence can still be considered “operably linked” to the coding sequence.

[0253] In some embodiments of any of the aspects, a polypeptide, nucleic acid, or cell as described herein can be engineered. As used herein, “engineered” refers to the aspect of having been manipulated by the hand of man. For example, a polypeptide is considered to be “engineered” when at least one aspect of the polypeptide, e.g., its sequence, has been manipulated by the hand of man to differ from the aspect as it exists in nature. As is common practice and is understood by those in the art, progeny of an engineered cell are typically still referred to as “engineered” even though the actual manipulation was performed on a prior entity.

[0254] In some embodiments of any of the aspects, an enzyme described herein is exogenous. In some embodiments of any of the aspects, an enzyme described herein is ectopic. In some embodiments of any of the aspects, an enzyme described herein is not endogenous.

[0255] The term “exogenous” refers to a substance present in a cell other than its native source. The term “exogenous” when used herein can refer to a nucleic acid (e.g. a nucleic acid encoding a polypeptide) or a polypeptide that has been introduced by a process involving the hand of man into a biological system such as a cell or organism in which it is not normally found and one wishes to introduce the nucleic acid or polypeptide into such a cell or organism. Alternatively, “exogenous” can refer to a nucleic acid or a polypeptide that has been introduced by a process involving the hand of man into a biological system such as a cell or organism in which it is found in relatively low amounts and one wishes to increase the amount of the nucleic acid or polypeptide in the cell or organism, e.g., to create ectopic expression or levels. In contrast, the term “endogenous” refers to a substance that is native to the biological system or cell. As used herein, “ectopic” refers to a substance that is found in an unusual location and/or amount. An ectopic substance can be one that is normally found in a given cell, but at a much lower amount and/or at a different time. Ectopic also includes substance, such as a polypeptide or nucleic acid that is not naturally found or expressed in a given cell in its natural environment.

[0256] In some embodiments of any of the aspects, a nucleic acid encoding a polypeptide as described herein (e.g. an enzyme) is comprised by a vector. In some of the aspects described herein, a nucleic acid sequence encoding a given polypeptide as described herein, or any module thereof, is operably linked to a vector. The term “vector”, as used herein, refers to a nucleic acid construct designed for delivery to a host cell or for transfer between different host cells. As used herein, a vector can be viral or non-viral. The term “vector” encompasses any genetic element that is capable of replication when associated with the proper control elements and that can transfer gene sequences to cells. A vector can include, but is not limited to, a cloning vector, an expression vector, a plasmid, phage, transposon, cosmid, chromosome, virus, virion, etc.

[0257] In some embodiments of any of the aspects, the vector is recombinant, e.g., it comprises sequences originating from at least two different sources. In some embodiments of any of the aspects, the vector comprises sequences originating from at least two different species. In some embodiments of any of the aspects, the vector comprises sequences originating from at least two different genes, e.g., it comprises a fusion protein or a nucleic acid encoding an expression product which is operably linked to at least one non-native (e.g., heterologous) genetic control element (e.g., a promoter, suppressor, activator, enhancer, response element, or the like).

[0258] In some embodiments of any of the aspects, the vector or nucleic acid described herein is codon-optimized, e.g., the native or wild-type sequence of the nucleic acid sequence has been altered or engineered to include alternative codons such that altered or engineered nucleic acid encodes the same polypeptide expression product as the native/wild-type sequence, but will be transcribed and/or translated at an improved efficiency in a desired expression system. In some embodiments of any of the aspects, the expression system is an organism other than the source of the native/wild-type sequence (or a cell obtained from such organism). In some embodiments of any of the aspects, the vector and/or nucleic acid sequence described herein is codon-optimized for expression in a mammal or mammalian cell, e.g., a mouse, a murine cell, or a human cell. In some embodiments of any of the aspects, the vector and/or nucleic acid sequence described herein is codon-optimized for expression in a human cell. In some embodiments of any of the aspects, the vector and/or nucleic acid sequence described herein is codon-optimized for expression in a yeast or yeast cell. In some embodiments of any of the aspects, the vector and/or nucleic acid sequence described herein is codon-optimized for expression in a bacterial cell. In some embodiments of any of the aspects, the vector and/or nucleic acid sequence described herein is codon-optimized for expression in an E. coli cell.

[0259] As used herein, the term “expression vector” refers to a vector that directs expression of an RNA or polypeptide from sequences linked to transcriptional regulatory sequences on the vector. The sequences expressed will often, but not necessarily, be heterologous to the cell. An expression vector may comprise additional elements, for example, the expression vector may have two replication systems, thus allowing it to be maintained in two organisms, for example in human cells for expression and in a prokaryotic host for cloning and amplification.

[0260] As used herein, the term “viral vector” refers to a nucleic acid vector construct that includes at least one element of viral origin and has the capacity to be packaged into a viral vector particle. The viral vector can contain the nucleic acid encoding a polypeptide as described herein in place of non-essential viral genes. The vector and/or particle may be utilized for the purpose of transferring any nucleic acids into cells either in vitro or in vivo. Numerous forms of viral vectors are known in the art.

[0261] It should be understood that the vectors described herein can, in some embodiments, be combined with other suitable compositions and therapies. In some embodiments of any of the aspects, the vector is episomal. The use of a suitable episomal vector provides a means of maintaining the nucleotide of interest in the subject in high copy number extra chromosomal DNA thereby eliminating potential effects of chromosomal integration.

[0262] As used herein, the terms “treat,” “treatment,” “treating,” or “amelioration” refer to therapeutic treatments, wherein the object is to reverse, alleviate, ameliorate, inhibit, slow down or stop the progression or severity of a condition associated with a disease or disorder, e.g. a digestive condition. The term “treating” includes reducing or alleviating at least one adverse effect or symptom of a condition, disease or disorder associated with a digestive condition. Treatment is generally “effective” if one or more symptoms or clinical markers are reduced. Alternatively, treatment is “effective” if the progression of a disease is reduced or halted. That is, “treatment” includes not just the improvement of symptoms or markers, but also a cessation of, or at least slowing of, progress or worsening of symptoms compared to what would be expected in the absence of treatment. Beneficial or desired clinical results include, but are not limited to, alleviation of one or more symptom(s), diminishment of extent of disease, stabilized (i.e., not worsening) state of disease, delay or slowing of disease progression, amelioration or palliation of the disease state, remission (whether partial or total), and/or decreased mortality, whether detectable or undetectable. The term “treatment” of a disease also includes providing relief from the symptoms or side-effects of the disease (including palliative treatment).

[0263] In some embodiments of any of the aspects, described herein is a prophylactic method of treatment. As used herein “prophylactic” refers to the timing and intent of a treatment relative to a disease or symptom, that is, the treatment is administered prior to clinical detection or diagnosis of that particular disease or symptom in order to protect the patient from the disease or symptom. Prophylactic treatment can encompass a reduction in the severity or speed of onset of the disease or symptom, or contribute to faster recovery from the disease or symptom. Accordingly, the methods described herein can be prophylactic relative to symptoms induced by eating particular foodstuffs (e.g., FODMAPs). For example, the composition or combination can be consumed prior to eating/drinking other substances in order to prevent or reduce the severity of bloating, gas, constipation, etc. as described herein. In some embodiments of any of the aspects, prophylactic treatment is not prevention of all symptoms or signs of a disease.

[0264] As used herein, the term “pharmaceutical composition” refers to the active agent in combination with a pharmaceutically acceptable carrier e.g. a carrier commonly used in the pharmaceutical industry. The phrase “pharmaceutically acceptable” is employed herein to refer to those compounds, materials, compositions, and/or dosage forms which are, within the scope of sound medical judgment, suitable for use in contact with the tissues of human beings and animals without excessive toxicity, irritation, allergic response, or other problem or complication, commensurate with a reasonable benefit/risk ratio. In some embodiments of any of the aspects, a pharmaceutically acceptable carrier can be a carrier other than water. In some embodiments of any of the aspects, a pharmaceutically acceptable carrier can be a cream, emulsion, gel, liposome, nanoparticle, and/or ointment. In some embodiments of any of the aspects, a pharmaceutically acceptable carrier can be an artificial or engineered carrier, e.g., a carrier that the active ingredient would not be found to occur in in nature.

[0265] As used herein, the term “administering,” refers to the placement of a compound as disclosed herein into a subject by a method or route which results in at least partial delivery of the agent at a desired site. Pharmaceutical compositions comprising the compounds disclosed herein can be administered by any appropriate route which results in an effective treatment in the subject. In some embodiments of any of the aspects, administration comprises physical human activity, e.g., an injection, act of ingestion, an act of application, and/or manipulation of a delivery device or machine. Such activity can be performed, e.g., by a medical professional and/or the subject being treated.

[0266] The term “statistically significant” or “significantly” refers to statistical significance and generally means a two standard deviation (2SD) or greater difference.

[0267] Other than in the operating examples, or where otherwise indicated, all numbers expressing quantities of ingredients or reaction conditions used herein should be understood as modified in all instances by the term “about.” The term “about” when used in connection with percentages can mean ±1%.

[0268] As used herein, the term “comprising” means that other elements can also be present in addition to the defined elements presented. The use of “comprising” indicates inclusion rather than limitation.

[0269] The term “consisting of” refers to compositions, methods, and respective components thereof as described herein, which are exclusive of any element not recited in that description of the embodiment.

[0270] As used herein the term “consisting essentially of” refers to those elements required for a given embodiment. The term permits the presence of additional elements that do not materially affect the basic and novel or functional characteristic(s) of that embodiment of the invention.

[0271] The singular terms “a,” “an,” and “the” include plural referents unless context clearly indicates otherwise. Similarly, the word “or” is intended to include “and” unless the context clearly indicates otherwise. Although methods and materials similar or equivalent to those described herein can be used in the practice or testing of this disclosure, suitable methods and materials are described below. The abbreviation, “e.g.” is derived from the Latin exempli gratia, and is used herein to indicate a non-limiting example. Thus, the abbreviation “e.g.” is synonymous with the term “for example.”

[0272] Groupings of alternative elements or embodiments of the invention disclosed herein are not to be construed as limitations. Each group member can be referred to and claimed individually or in any combination with other members of the group or other elements found herein. One or more members of a group can be included in, or deleted from, a group for reasons of convenience and/or patentability. When any such inclusion or deletion occurs, the specification is herein deemed to contain the group as modified thus fulfilling the written description of all Markush groups used in the appended claims.

[0273] Unless otherwise defined herein, scientific and technical terms used in connection with the present application shall have the meanings that are commonly understood by those of ordinary skill in the art to which this disclosure belongs. It should be understood that this invention is not limited to the particular methodology, protocols, and reagents, etc., described herein and as such can vary. The terminology used herein is for the purpose of describing particular embodiments only, and is not intended to limit the scope of the present invention, which is defined solely by the claims. Definitions of common terms in immunology and molecular biology can be found in The Merck Manual of Diagnosis and Therapy, 20th Edition, published by Merck Sharp & Dohme Corp., 2018 (ISBN 0911910190, 978-0911910421); Robert S. Porter et al. (eds.), The Encyclopedia of Molecular Cell Biology and Molecular Medicine, published by Blackwell Science Ltd., 1999-2012 (ISBN 9783527600908); and Robert A. Meyers (ed.), Molecular Biology and Biotechnology: a Comprehensive Desk Reference, published by VCH Publishers, Inc., 1995 (ISBN 1-56081-569-8); Immunology by Werner Luttmann, published by Elsevier, 2006; Janeway’s Immunobiology, Kenneth Murphy, Allan Mowat, Casey Weaver (eds.), W. W. Norton & Company, 2016 (ISBN 0815345054, 978-0815345053); Lewin’s Genes XI, published by Jones & Bartlett Publishers, 2014 (ISBN-1449659055); Michael Richard Green and Joseph Sambrook, Molecular Cloning: A Laboratory Manual, 4th ed., Cold Spring Harbor Laboratory Press, Cold Spring Harbor, N.Y., USA (2012) (ISBN 1936113414); Davis et al., Basic Methods in Molecular Biology, Elsevier Science Publishing, Inc., New York, USA (2012) (ISBN 044460149X); Laboratory Methods in Enzymology: DNA, Jon Lorsch (ed.) Elsevier, 2013 (ISBN 0124199542); Current Protocols in Molecular Biology (CPMB), Frederick M. Ausubel (ed.), John Wiley and Sons, 2014 (ISBN 047150338X, 9780471503385), Current Protocols in Protein Science (CPPS), John E. Coligan (ed.), John Wiley and Sons, Inc., 2005; and Current Protocols in Immunology (CPI) (John E. Coligan, ADA M Kruisbeek, David H Margulies, Ethan M Shevach, Warren Strobe, (eds.) John Wiley and Sons, Inc., 2003 (ISBN 0471142735, 9780471142737), the contents of which are all incorporated by reference herein in their entireties.

[0274] Other terms are defined herein within the description of the various aspects of the invention.

[0275] All patents and other publications; including literature references, issued patents, published patent applications, and co-pending patent applications; cited throughout this application are expressly incorporated herein by reference for the purpose of describing and disclosing, for example, the methodologies described in such publications that might be used in connection with the technology described herein. These publications are provided solely for their disclosure prior to the filing date of the present application. Nothing in this regard should be construed as an admission that the inventors are not entitled to antedate such disclosure by virtue of prior invention or for any other reason. All statements as to the date or representation as to the contents of these documents is based on the information available to the applicants and does not constitute any admission as to the correctness of the dates or contents of these documents.

[0276] The description of embodiments of the disclosure is not intended to be exhaustive or to limit the disclosure to the precise form disclosed. While specific embodiments of, and examples for, the disclosure are described herein for illustrative purposes, various equivalent modifications are possible within the scope of the disclosure, as those skilled in the relevant art will recognize. For example, while method steps or functions are presented in a given order, alternative embodiments may perform functions in a different order, or functions may be performed substantially concurrently. The teachings of the disclosure provided herein can be applied to other procedures or methods as appropriate. The various embodiments described herein can be combined to provide further embodiments. Aspects of the disclosure can be modified, if necessary, to employ the compositions, functions and concepts of the above references and application to provide yet further embodiments of the disclosure. Moreover, due to biological functional equivalency considerations, some changes can be made in protein structure without affecting the biological or chemical action in kind or amount. These and other changes can be made to the disclosure in light of the detailed description. All such modifications are intended to be included within the scope of the appended claims.

[0277] Specific elements of any of the foregoing embodiments can be combined or substituted for elements in other embodiments. Furthermore, while advantages associated with certain embodiments of the disclosure have been described in the context of these embodiments, other embodiments may also exhibit such advantages, and not all embodiments need necessarily exhibit such advantages to fall within the scope of the disclosure.

[0278] In some embodiments, the present technology may be defined in any of the following numbered paragraphs:

[0279] 1. A composition or combination comprising at least one of:
[0280] a. At least one fructan-degrading enzyme;
[0281] b. At least one galactosidase;
[0282] c. At least one sorbitol-degrading enzyme;
[0283] d. At least one mannitol-degrading enzyme;
[0284] e. At least one glucose isomerase; and
[0285] f. At least one mannose isomerase.

[0286] 2. A composition or combination comprising at least one of:
[0287] a. At least one fructan-degrading enzyme;
[0288] b. At least one galactosidase;
[0289] c. At least one sorbitol-degrading enzyme;
[0290] d. At least one mannitol-degrading enzyme; and
[0291] e. At least one glucose isomerase.

[0292] 3. The composition or combination of numbered paragraph 1, comprising at least one of:
[0293] a. At least one fructan-degrading enzyme;
[0294] b. At least one galactosidase;
[0295] c. At least one sorbitol-degrading enzyme; and
[0296] d. At least one mannitol-degrading enzyme.

[0297] 4. The composition or combination of numbered paragraph 1, comprising at least two of:
[0298] a. At least one fructan-degrading enzyme;
[0299] b. At least one galactosidase;
[0300] c. At least one sorbitol-degrading enzyme; and
[0301] d. At least one mannitol-degrading enzyme.

[0302] 5. The composition or combination of numbered paragraph 1, comprising at least three of:
[0303] a. At least one fructan-degrading enzyme;
[0304] b. At least one galactosidase;
[0305] c. At least one sorbitol-degrading enzyme; and
[0306] d. At least one mannitol-degrading enzyme.

[0307] 6. The composition or combination of numbered paragraph 1, comprising:
[0308] a. At least one fructan-degrading enzyme;
[0309] b. At least one galactosidase;
[0310] c. At least one sorbitol-degrading enzyme; and
[0311] d. At least one mannitol-degrading enzyme.

[0312] 7. A composition or combination comprising:
[0313] a. At least one fructan-degrading enzyme; and
[0314] b. At least one galactosidase.

[0315] 8. A composition or combination comprising:
[0316] a. At least one fructan-degrading enzyme;
[0317] b. At least one sorbitol-degrading enzyme;
[0318] c. At least one mannitol-degrading enzyme; and
[0319] d. At least one glucose isomerase.

[0320] 9. A composition or combination comprising:
[0321] a. At least one fructan-degrading enzyme;
[0322] b. At least one galactosidase; and
[0323] c. At least one glucose isomerase.

[0324] 10. A composition or combination comprising:
[0325] a. At least one fructan-degrading enzyme;
[0326] b. At least one alpha-galactosidase; and
[0327] c. At least one lactase.

[0328] 11. A composition or combination comprising:
[0329] a. At least one fructan-degrading enzyme;
[0330] b. At least one galactosidase;
[0331] c. At least one sorbitol-degrading enzyme;
[0332] d. At least one mannitol-degrading enzyme;
[0333] e. At least one glucose isomerase; and
[0334] f. At least one mannose isomerase.

[0335] 12. The composition or combination of any of the preceding numbered paragraphs, wherein the at least one fructan-degrading enzyme comprises an inulinase, and optionally, has a sequence with at least 80% sequence identity to one of SEQ ID NOs: 305-799.

[0336] 13. The composition or combination of numbered paragraph 12, wherein the inulinase is a yeast inulinase.

[0337] 14. The composition or combination of numbered paragraph 12, wherein the inulinase is an exo-inulinase.

[0338] 15. The composition or combination of numbered paragraph 14, wherein the exo-inulinase is an exo-inulinase of, or is obtained from an Aspergillus or Kluyveromyces spp.

[0339] 16. The composition or combination of numbered paragraph 14, wherein the exo-inulinase is an exo-inulinase of, or is obtained from Aspergillus oryzae or Kluyveromyces marxianus.

[0340] 17. The composition or combination of numbered paragraph 14, wherein the exo-inulinase is an exo-inulinase of, or is obtained from Kluyveromyces marxianus CBS6014.

[0341] 18. The composition or combination of numbered paragraph 14, wherein the exo-inulinase has a sequence with at least 80% sequence identity to one of SEQ ID NOs: 3-7, 29-31, and 42-45.

[0342] 19. The composition or combination of numbered paragraph 12, wherein the inulinase is an endo-inulinase.

[0343] 20. The composition or combination of numbered paragraph 19, wherein the endo-inulinase is an endo-inulinase of, or is obtained from an Aspergillus spp.

[0344] 21. The composition or combination of numbered paragraph 20, wherein the endo-inulinase is an endo-inulinase of, or is obtained from Aspergillus niger.

[0345] 22. The composition or combination of numbered paragraph 21, wherein the endo-inulinase has a sequence with at least 80% sequence identity to one of SEQ ID NOs: 1-2.

[0346] 23. The composition or combination of any of the preceding numbered paragraphs, comprising both an exo-inulinase and an endo-inulinase.

[0347] 24. The composition or combination of any of the preceding numbered paragraphs, wherein the at least one fructan-degrading enzyme comprises a levanase.

[0348] 25. The composition or combination of numbered paragraph 24, wherein the inulinase is a bacterial levanase.

[0349] 26. The composition or combination of numbered paragraph 25, wherein the inulinase is an exo-levanase.

[0350] 27. The composition or combination of numbered paragraph 26, wherein the exo-levanase is an exo-levanase of, or is obtained from an Gluconacetobacter spp.

[0351] 28. The composition or combination of numbered paragraph 26, wherein the exo-levanase is an exo-levanase of, or is obtained from Gluconacetobacter johannae.

[0352] 29. The composition or combination of numbered paragraph 26, wherein the exo-levanase has a sequence with at least 80% sequence identity to SEQ ID NO: 50.

[0353] 30. The composition or combination of numbered paragraph 24, wherein the levanase is an endo-levanase.

[0354] 31. The composition or combination of numbered paragraph 30, wherein the endo-levanase is an endo-levanase of, or is obtained from an Bacillus spp.

[0355] 32. The composition or combination of numbered paragraph 30, wherein the endo-levanase is an endo-levanase of, or is obtained from Bacillus spizizenii.

[0356] 33. The composition or combination of numbered paragraph 30, wherein the endo-levanase has a sequence with at least 80% sequence identity to SEQ ID NO 49.

[0357] 34. The composition or combination of any of the preceding numbered paragraphs, comprising both an exo-levanase and an endo-levanase.

[0358] 35. The composition or combination of any of the preceding numbered paragraphs, wherein the at least one fructan-degrading enzyme comprises an amyloglucosidase.

[0359] 36. The composition or combination of numbered paragraph 35, wherein the amyloglucosidase comprises a sequence with at least 80% sequence identity to one of SEQ ID NOs: 8-10.

[0360] 37. The composition or combination of any of the preceding numbered paragraphs, wherein the at least one galactosidase comprises an alpha-galactosidase.

[0361] 38. The composition or combination of numbered paragraph 37, wherein the alpha-galactosidase is an alpha-galactosidase of, or is obtained from an Aspergillus spp.

[0362] 39. The composition or combination of numbered paragraph 37, wherein the alpha-galactosidase is an alpha-galactosidase of, or is obtained from Aspergillus niger.

[0363] 40. The composition or combination of numbered paragraph 37, wherein the alpha-galactosidase comprises a sequence with at least 80% sequence identity to one of SEQ ID NOs: 11-14.

[0364] 41. The composition or combination of any of the preceding numbered paragraphs, wherein the at least one galactosidase comprises a beta-galactosidase.

[0365] 42. The composition or combination of numbered paragraph 41, wherein the beta-galactosidase is a beta-galactosidase of, or is obtained from an Aspergillus spp.

[0366] 43. The composition or combination of numbered paragraph 41, wherein the beta-galactosidase is a beta-galactosidase of, or is obtained from Aspergillus niger.

[0367] 44. The composition or combination of numbered paragraph 41, wherein the beta-galactosidase comprises a sequence with at least 80% sequence identity to SEQ ID NO: 15.

[0368] 45. The composition or combination of any of the preceding numbered paragraphs, wherein the at least one galactosidase comprises a lactase.

[0369] 46. The composition or combination of numbered paragraph 10 or 45, wherein the lactase is a lactase of, or is obtained from an Kluyveromyces or Aspergillus spp.

[0370] 47. The composition or combination of numbered paragraph 10 or 45, wherein the lactase is a lactase of, or is obtained from Kluyveromyces lactis, Kluyveromyces marxianus, Aspergillus niger, or Aspergillus oryzae.

[0371] 48. The composition or combination of numbered paragraph 10 or 45, wherein the lactase comprises a sequence with at least 80% sequence identity to one of SEQ ID NOs: 15 or 36-41.

[0372] 49. The composition or combination of any of the preceding numbered paragraphs, wherein the at least one galactosidase comprises an alpha-galactosidase and a beta-galactosidase.

[0373] 50. The composition or combination of any of the preceding numbered paragraphs, wherein the at least one sorbitol-degrading enzyme comprises a sorbitol dehydrogenase.

[0374] 51. The composition or combination of numbered paragraph 50, wherein the sorbitol dehydrogenase is a mammalian sorbitol dehydrogenase.

[0375] 52. The composition or combination of numbered paragraph 50, wherein the sorbitol dehydrogenase is a sorbitol dehydrogenase of, or is obtained from a Ovis or Rattus species.

[0376] 53. The composition or combination of numbered paragraph 50, wherein the sorbitol dehydrogenase has a sequence with at least 80% sequence identity to one of SEQ ID NOs: 16-18.

[0377] 54. The composition or combination of any of the preceding numbered paragraphs, wherein the at least one sorbitol-degrading enzyme comprises a sorbitol oxidase.

[0378] 55. The composition or combination of numbered paragraph 54, wherein the sorbitol oxidase is a yeast sorbitol oxidase.

[0379] 56. The composition or combination of numbered paragraph 54, wherein the sorbitol oxidase has a sequence with at least 80% sequence identity to at least one of SEQ ID NOs: 19, 32-35, and 51-304.

[0380] 57. The composition or combination of any of the preceding numbered paragraphs, wherein the at least one mannitol-degrading enzyme comprises a mannitol dehydrogenase.

[0381] 58. The composition or combination of numbered paragraph 57, wherein the mannitol dehydrogenase is a bacterial mannitol dehydrogenase.

[0382] 59. The composition or combination of numbered paragraph 58, wherein the mannitol dehydrogenase is a mannitol dehydrogenase of, or is obtained from a Pseudomonas, Escherichia, Leuconostoc, or Gluconobacter spp.

[0383] 60. The composition or combination of numbered paragraph 58, wherein the mannitol dehydrogenase is a mannitol dehydrogenase of, or is obtained from P. fluorescens, E. coli, L. mesenteroides, or G. oxydans.

[0384] 61. The composition or combination of numbered paragraph 58, wherein the mannitol dehydrogenase has a sequence with at least 80% sequence identity to one of SEQ ID NOs: 20-26.

[0385] 62. The composition or combination of numbered paragraph 57, wherein the at least one mannitol-degrading enzyme comprises a mannitol oxidase.

[0386] 63. The composition or combination of numbered paragraph 62, wherein the mannitol oxidase has a sequence with at least 80% sequence identity to at least one of SEQ ID NOs: 32-35 and 51-304.

[0387] 64. The composition or combination of any of the preceding numbered paragraphs, wherein the glucose isomerase is a yeast glucose isomerase.

[0388] 65. The composition or combination of numbered paragraph 64, wherein the glucose isomerase is a glucose isomerase of, or is obtained from a Streptomyces spp.

[0389] 66. The composition or combination of numbered paragraph 64, wherein the glucose isomerase is a glucose isomerase of, or is obtained from S. murinus.

[0390] 67. The composition or combination of numbered paragraph 64, wherein the glucose isomerase has a sequence with at least 80% sequence identity to SEQ ID NO: 27.

[0391] 68. The composition or combination of any of the preceding numbered paragraphs, wherein the mannose isomerase is a bacterial mannose isomerase.

[0392] 69. The composition or combination of numbered paragraph 68, wherein the mannose isomerase is a mannose isomerase of, or is obtained from a Thermobifida spp.

[0393] 70. The composition or combination of numbered paragraph 68, wherein the mannose isomerase is a mannose isomerase of, or is obtained from T. fusca.

[0394] 71. The composition or combination of numbered paragraph 68, wherein the mannose isomerase has a sequence with at least 80% sequence identity to SEQ ID NO: 28.

[0395] 72. The composition or combination of any of the preceding numbered paragraphs, further comprising one or more of: a cofactor; a metal ion; an antacid; an H2 antagonist; a proton pump inhibitor; a pepstatin protease inhibitor; or a protease inhibitor.

[0396] 73. The composition or combination of any of the preceding numbered paragraphs, formulated as a food supplement.

[0397] 74. The composition or combination of any of the preceding numbered paragraphs, packaged as or as part of a food, drink, or other nutritional product.

[0398] 75. The composition or combination of any of the preceding numbered paragraphs, further comprising a carrier.

[0399] 76. The composition or combination of any of the preceding numbered paragraphs, in a shelf-stable formulation.

[0400] 77. The composition or combination of any of the preceding numbered paragraphs, formulated as a powder, a solution, a pill, a capsule, a concentrate, a tablet, a soft-gel, a thin-film, a liquid, or a syrup.

[0401] 78. The composition or combination of any of the preceding numbered paragraphs, formulated as a powder.

[0402] 79. The composition or combination of any of the preceding numbered paragraphs, formulated as a composition comprising at least 10% protein and/or fats by weight.

[0403] 80. The composition or combination of numbered paragraph 79, wherein the composition comprises at least 20% protein and/or fats by weight.

[0404] 81. The composition or combination of any of the preceding numbered paragraphs, wherein the composition is chewable or a tablet.

[0405] 82. The composition or combination of any of the preceding numbered paragraphs, wherein the composition is chewable.

[0406] 83. The composition or combination of any of the preceding numbered paragraphs, wherein the composition does not comprise a coating or capsule.

[0407] 84. The composition or combination of any of the preceding numbered paragraphs, formulated with an enteric coating.

[0408] 85. The composition or combination of any of the preceding numbered paragraphs, provided as a single composition.

[0409] 86. The composition or combination of any of the preceding numbered paragraphs, provided as a combination of multiple compositions that can be mixed prior to administration or consumption, and/or administered or consumed separately.

[0410] 87. The composition or combination of any of the preceding numbered paragraphs, not comprising a live microbe.

[0411] 88. The composition or combination of any of the preceding numbered paragraphs, not comprising a live yeast.

[0412] 89. The composition or combination of any of the preceding numbered paragraphs, not comprising flour.

[0413] 90. The composition or combination of any of the preceding numbered paragraphs, further comprising 5-D-fructose dehydrogenase.

[0414] 91. The composition or combination of any of the preceding numbered paragraphs, not comprising an invertase.

[0415] 92. The composition or combination of any of the preceding numbered paragraphs, not comprising a beta-fructofuranosidase

[0416] 93. The composition or combination of any of the preceding numbered paragraphs, not comprising a beta-fructosidase.

[0417] 94. The composition or combination of any of the preceding numbered paragraphs, not comprising alpha-galactosidase, beta-glucanase, and/or pectinase.

[0418] 95. The composition or combination of any one of the preceding numbered paragraphs, wherein the composition or combination further comprises a live microbe, e.g., a live probiotic microbe.

[0419] 96. The composition or combination of numbered paragraph 95, wherein one or more of proteins of the composition or combination is expressed by the live microbe.

[0420] 97. A nucleic acid comprising a sequence encoding one or more of:
[0421] a. At least one fructan-degrading enzyme;
[0422] b. At least one galactosidase;
[0423] c. At least one sorbitol-degrading enzyme;
[0424] d. At least one mannitol-degrading enzyme;
[0425] e. At least one glucose isomerase; and
[0426] f. At least one mannose isomerase; and
at least one of:
[0427] g. an operably linked heterologous promoter; and
[0428] h. at least one codon optimized for expression in bacteria or yeast.

[0429] 98. A cell comprising the nucleic acid of numbered paragraph 97.

[0430] 99. A method of improving digestion, the method comprising consuming, or administering to a subject, the composition or combination of any of numbered paragraphs 1-96.

[0431] 100. A method of treating a digestive condition, the method comprising administering to a subject, the composition or combination of any of numbered paragraphs 1-96.

[0432] 101. The method of any of numbered paragraphs 99-100, where administering the composition to a subject comprises directing the subject to consume the composition or combination.

[0433] 102. The method of any of numbered paragraphs 99-101, wherein administering or consuming comprises chewing or masticating the composition or combination.

[0434] 103. The method of any of numbered paragraphs 99-102, wherein consumption or administration occurs within 30 minutes of consumption of a meal, or consumption of other food or drink.

[0435] 104. The method of any of numbered paragraphs 99-102, wherein consumption or administration occurs within 30 minutes prior to consumption of a meal, or consumption of other food or drink.

[0436] 105. The method of any of numbered paragraphs 99-102, wherein consumption or administration occurs within 20 minutes prior to consumption of a meal, or consumption of other food or drink.

[0437] 106. The method of any of numbered paragraphs 99-102, wherein consumption or administration occurs within 10 minutes prior to consumption of a meal, or consumption of other food or drink.

[0438] 107. The method of any of numbered paragraphs 99-102, wherein consumption or administration occurs at least partially during consumption of a meal, or consumption of other food or drink.

[0439] 108. The method of any of numbered paragraphs 99-102, wherein consumption or administration comprises consuming or ingesting the i) composition or combination and ii) a meal, food, or drink in the same bite or swallow.

[0440] 109. The method of numbered paragraph 108, wherein the composition or combination has been mixed, sprinkled, dissolved, combined with, or added to at least a portion of the meal, food, or drink.

[0441] 110. The method of numbered paragraph 108, wherein the composition or combination has been mixed, sprinkled, dissolved, combined with, or added to the meal, food, or drink.

[0442] 111. The method of any one of numbered paragraphs 108-110, wherein the composition or combination has been mixed, sprinkled, dissolved, combined with, or added to at least a portion of the meal, food, or drink immediately before consumption or administration.

[0443] 112. The method of any one of numbered paragraphs 108-110, wherein the composition or combination has been mixed, sprinkled, dissolved, combined with, or added to at least a portion of the meal, food, or drink no more than 1 minute before consumption or administration.

[0444] 113. The method of any one of numbered paragraphs 108-110, wherein the composition or combination has been mixed, sprinkled, dissolved, combined with, or added to at least a portion of the meal, food, or drink no more than 5 minutes before consumption or administration.

[0445] 114. The method of any one of numbered paragraphs 99-113, wherein the combination or composition comprises a live microbe according to any one of numbered paragraphs 95-96 and whereby the live microbe colonizes the mouth and/or small intestine of the subject.

[0446] 115. The method of any of numbered paragraphs 99-114, wherein the digestive condition is Irritable Bowel Syndrome (IBS); Inflammatory Bowel Disease (IBD); Non-celiac gluten sensitivity; small intestinal bacterial overgrowth (SIBO); small intestinal fungal overgrowth (SIFO); and/or allium intolerance.

[0447] 116. The method of any of numbered paragraphs 99-115, wherein the subject is sensitive to one or more FODMAPs.

[0448] 117. The method of any of numbered paragraphs 99-116, whereby bloating, gas, abdominal pain, abdominal discomfort, nausea, diarrhea, and/or constipation is decreased.

[0449] The technology described herein is further illustrated by the following examples which in no way should be construed as being further limiting.

### EXAMPLES

### Example 1

[0450] Experiments performed on a healthy individual consistently show remarkable reduction in symptoms when enzyme is used compared to control. The dose of high-fructan foods provided to the subject is enough to induce FODMAP-sensitivity symptoms in nearly all humans. Over the entire length of the testing period, subject has been on a low-FODMAP diet except when ingesting large amounts of fructan administered for testing purposes, in order to avoid interference of gastrointestinal symptoms from other meals. As the test subject is considered healthy, with no known gastrointestinal conditions or complaints, the amount of fructan administered at once was made to be very high so as to induce noticeable symptoms in the subject and aggravate gastrointestinal discomfort at a level that may be comparable to that experienced by individuals sensitive to smaller quantities of ingested fructans. The high-fructan food of choice in this case is shallots. The Monash University application database lists shallots as high in fructan at 6 g. This means that an individual sensitive to fructan will likely experience gastrointestinal symptoms at this serving size and should avoid intake. In the experiments related to the present invention, the healthy subject was administered 130 g of shallots at each testing instance, more than 20 times a serving size considered to cause gastrointestinal distress in individuals sensitive to fructan.

[0451] Shallots were fried in oil for seven minutes on medium heat, then administered with or without enzyme mixed into the dish. The enzymes included in the experiment are as follows: (1) exo-inulinase (at activity level of 20,000 units/g) procured from Creative Enzymes; (2) glucose isomerase (5,000 units/g) procured from Creative Enzymes; and (3) endo-inulinase (10,000 units/g) procured from Shaanxi Greenbo Biochem Co., Ltd (Xian, China). Healthy subject then proceeded to track symptoms for the next twelve hours. Each instance of flatulence was noted and timestamped, accompanied by a judgment on magnitude (either “micro,” “small,” “medium,” or “large”). Symptoms like abdominal pain, abdominal discomfort, and bloating were noted when they arose. See Table 11 below for symptoms by category during each experiment. Instances of flatulence within two hours of ingesting the shallots were omitted due to the low likelihood of the fructans having reached the intestines where they could be fermented in so short of a time. Each row indicates a distinct experiment with the 130 g of shallots.

[0452] Comparison between the two trials during which no enzyme was given and the four trials accompanied with some combination of enzyme show clear reduction in flatulence (on account of total instances as well as the number of “large” instances) and other symptoms.

TABLE 11

| Enzymes Given | “Micro” | “Small” | “Medium” | “Large” | Total Instances (Unweighted) | Notes of Other Symptoms |
|---|---|---|---|---|---|---|
| None | 1 | 10 | 17 | 2 | 30 | Abdominal discomfort |
| None | 0 | 3 | 9 | 5 | 17 | Abdominal discomfort, bloating, mild pain, visible abdominal distension, flatulence odor (subject reported bloating, distension, and mild pain to have continued the next morning) |
| 1 g exo-inulinase | 0 | 4 | 6 | 0 | 10 | None reported |
| 0.8 g exo-inulinase | 0 | 1 | 7 | 0 | 8 | None reported |
| 1.2 g exo-inulinase; 1 g endo-inulinase; 0.75 g glucose isomerase | 3 | 1 | 1 | 0 | 5 | None reported |
| 1.75 g exo-inulinase; 0.5 g endo-inulinase | 0 | 1 | 5 | 1 | 7 | None reported |

### Example 2

[0453] Following the protocol related in Example 1, subjects were administered 260 g servings of steamed shallots with exo-inulinase or a dextrose/maltodextrin placebo. Flatulence symptoms were recorded over a 24 hour period. Administration of exo-inulinase clearly reduced flatulence (on account of total instances as well as the number of “large” instances) (Table 16). The affect on flatulence is shown in FIG. 1, which depicts weighted flatulence scores.

TABLE 16

Flatulence occurrences. Each line is an individual treatment and 24 hour symptom observation period

| Treatment | Weighted | Small | Medium | Large |
|---|---|---|---|---|
| Exo-inulinase | 20 | 6 | 7 | 0 |
| Placebo | 99 | 8 | 29 | 11 |
| Placebo | 59 | 8 | 21 | 3 |
| Exo-inulinase | 19 | 4 | 6 | 1 |
| Placebo | 70 | 4 | 27 | 4 |
| Placebo | 71 | 5 | 24 | 6 |
| Exo-inulinase | 9 | 5 | 2 | 0 |
| Exo-inulinase | 7 | 1 | 3 | 0 |
| Exo-inulinase | 8 | 2 | 3 | 0 |
| Placebo | 73 | 11 | 25 | 4 |

### Example 3

[0454] Following the protocol related in Example 1, subjects were administered chicory root fiber bars comprising 40 g of fructan/inulin at each testing instance, approximately 200 times the serving size considered to cause gastrointestinal distress in individuals sensitive to fructan. This dose of fructan/inulin will induce FODMAP-sensitivity symptoms in nearly all subjects, regardless of whether they report FODMAP-sensitivity in response to their normal diets.

[0455] The subjects were administered exo-inulinase exo-inulinase or a dextrose/maltodextrin placebo with the fructan/inulin. Flatulence and diarrhea symptoms were recorded over a 24 hour period (Table 17). Administration of exo-inulinase clearly reduced diarrhea and flatulence (on account of total instances as well as the number of “large” instances). The affect on diarrhea and flatulence is shown in FIG. 2, which depicts diarrhea episodes and weighted flatulence scores.

TABLE 17

| Treatment | Weighted Flatulence | Flatulence | | | Diarrhea Events |
|---|---|---|---|---|---|
| | | Small | Medium | Large | |
| Placebo | 78 | 7 | 22 | 9 | 1 |
| Placebo | 85 | 6 | 26 | 9 | 8 |
| Placebo | 37 | 3 | 14 | 2 | 7 |
| Placebo | 37 | 1 | 6 | 8 | 13 |
| Placebo | 43 | 4 | 6 | 9 | 8 |
| Placebo | 188 | 6 | 31 | 40 | 1 |
| Placebo | 139 | 8 | 28 | 25 | 0 |
| Exo-inulinase | 25 | 8 | 4 | 3 | 0 |
| Exo-inulinase | 18 | 9 | 3 | 1 | 0 |
| Exo- | 12 | 1 | 4 | 1 | 0 |
| inulinase | | | | | |
| Exo-inulinase | 15 | 2 | 5 | 1 | 0 |
| Exo-inulinase | 11 | 3 | 4 | 0 | 0 |
| Exo-inulinase | 20 | 7 | 4 | 0 | Not recorded |
| Exo-inulinase | 42 | 5 | 8 | 7 | Not recorded |

What is claimed herein is:

1-117. (canceled)

118. A composition comprising:
at least one fructan-degrading enzyme; and
at least one carrier.

119. The composition of claim 118, formulated as a powder.

120. A kit comprising the composition of claim 119 and a dispenser or dosage guide that provides a dose comprising between 500 and 1,000,000 units of enzymatic activity for each enzyme per dose.

121. The kit of claim 120, wherein the dispenser comprises a) a spoon sized or marked for a desired dosage or b) one or more single dosage packets.

122. The composition of claim 118, formulated as a capsule, pill, or tablet comprising a dose of between 500 and 1,000,000 units of enzymatic activity for each enzyme per dose.

123. The composition of claim 118, wherein the at least one fructan-degrading enzyme comprises an inulinase.

124. The composition of claim 123, wherein the inulinase is a yeast inulinase.

125. The composition of claim 123, wherein the inulinase is an exo-inulinase.

126. The composition of claim 125, wherein the exo-inulinase is an exo-inulinase of, or is obtained from an Aspergillus or Kluyveromyces spp.

127. The composition of claim 126, wherein the exo-inulinase is an exo-inulinase of, or is obtained from Aspergillus oryzae or Kluyveromyces marxianus.

128. The composition of claim 125, wherein the exo-inulinase has a sequence with at least 80% sequence identity to one of SEQ ID NOs: 3-6, 29-31, and 42-45.

129. The composition of claim 123, wherein the inulinase is an endo-inulinase.

130. The composition of claim 129, wherein the endo-inulinase is an endo-inulinase of, or is obtained from an Aspergillus spp.

131. The composition of claim 130, wherein the endo-inulinase is an endo-inulinase of, or is obtained from Aspergillus niger.

132. The composition of claim 129, wherein the endo-inulinase has a sequence with at least 80% sequence identity to one of SEQ ID NOs: 1-2.

133. The composition of claim 118, comprising both an exo-inulinase and an endo-inulinase.

134. The composition of claim 118, wherein the composition or combination does not comprise an amyloglucosidase.

135. The composition of claim 118, further comprising an antacid, H2 antagonist, or proton pump inhibitor.

136. The composition of claim 118, further comprising at least one of:
at least one galactosidase;
at least one sorbitol-degrading enzyme;
at least one mannitol-degrading enzyme;
at least one glucose isomerase; and
at least one mannose isomerase.

137. The composition of claim 136, wherein the at least one galactosidase comprises an alpha-galactosidase.

138. The composition of claim 137, wherein the alpha-galactosidase is an alpha-galactosidase of, or is obtained from an Aspergillus spp.

139. The composition of claim 137, wherein the alpha-galactosidase is an alpha-galactosidase of, or is obtained from Aspergillus niger.

140. The composition of claim 137, wherein the alpha-galactosidase comprises a sequence with at least 80% sequence identity to one of SEQ ID NOs: 11-14.

141. The composition of claim 136, wherein the at least one galactosidase comprises at least one lactase.

142. The composition of claim 118, formulated as a food supplement.

143. The composition of claim 118, in a shelf-stable formulation.

144. The composition of claim 118, formulated as a composition comprising at least 10% protein and/or fats by weight.

145. The composition of claim 118, wherein the composition does not comprise a coating or capsule.

146. The composition of claim 118, packaged as or as part of a food, drink, or other nutritional product.

147. The composition of claim 146, wherein the food is a canned fruit or vegetable, fruit or vegetable puree or paste, a seasoning, or a condiment.

148. A method of improving digestion, the method comprising consuming, or administering to a subject, the composition of claim 118.

149. The method of claim 148, wherein consumption or administration occurs within 30 minutes of consumption of a meal, or consumption of other food or drink.

150. The method of claim 148, wherein consumption or administration occurs within 30 minutes prior to consumption of a meal, or consumption of other food or drink.

151. The method of claim 148, wherein consumption or administration occurs at least partially during consumption of a meal, or consumption of other food or drink.

152. The method of claim 148, wherein consumption or administration comprises consuming or ingesting the i) composition or combination and ii) a meal, food, or drink in the same bite or swallow.

153. The method of claim 148, wherein the composition or combination has been mixed, sprinkled, dissolved, combined with, or added to at least a portion of the meal, food, or drink.

154. The method of claim 148, wherein the digestive condition is Irritable Bowel Syndrome (IBS); Inflammatory Bowel Disease (IBD); Non-celiac gluten sensitivity; small intestinal bacterial overgrowth (SIBO); small intestinal fungal overgrowth (SIFO); or allium intolerance.

155. The method of claim 148, wherein the subject is sensitive to one or more FODMAPs.

156. The method of claim 148, whereby bloating, gas, abdominal pain, abdominal discomfort, nausea, diarrhea, or constipation is decreased.

The application's sequence listing, which the Patent Office published only in electronic form, follows.

SEQUENCE LISTING (799 sequences)

SEQ ID NO: 1 - protein, 516 aa, Unknown
  Description of Unknown: Aspergillus niger sequence
MLNPKVAYMVWMTCLGLTLPSQAQSNDYRPSYHFTPDQYWMNEPNGLIKIGSTWHLFFQHNPTANVWGNICWGHATSTDLMHWAHKPTAIADENGVEAFTGTAYYDPNNASGLGDSANPPYLAWFTGYTVSSQTQDQRLAFSVDNGATWTKFQGNPIISTSQEAPHDITGGLESRDPKVFFHRQSGNWIMVLAHGGQDKLSFWTSADTINWTWQSDLKSTSINGLSSDITGWEVPDMFELPVEGTEETTWVVMMTPAEGSPAGGNGVLAITGSFDGKSFTADPVDASTMWLNNGRDFDGALSWVNVPASDGRRIIAAVMNSYGSNPPTTTWKGMLSFPRTLSLKKVGTQQHFVQQPITELDTISTSLQTLENQTITPGQTLLSSIRGTALDVRVAFYPDAGSVLSLAVRKGASEQTVIKYTQSDATLSVDRTESGDTSYDPAASGVHTAKLEEDDTGLVSIRVLVDTCSVEVFGGQGEAVISDLIFPSDSSDGLALEVTGGNAVLQSVDVRSVSLE

SEQ ID NO: 2 - protein, 515 aa, Unknown
  Description of Unknown: Penicillium sp. sequence
MISQGLTGALKALPLVCALVARAVADDYRPAFHFCPAENWMNEPNGLIQINSTWHLFYQADPAANVWGNECWGHATSSDLLHWDHLPVAIPVENGIESFTGTSYYDSNNTSGLGTSTNPPYLAFFTGYTESNKTQDQRLAYSTDLGQTWVKFAGNPIIGAAQEAPQDISGGLESRDPKVFFHAPSGKWVMVLAHGGQDKLTFWTSLDAKNWTWVSDLSSSQIEGFPSSITGWEVPDMFQLPIQGIKKTTWVLIFTPAQGSPPGGNGVVALTGSFDGETFVADPVDPSTLWLDYGRDFDGALSWENVPASDGRRIIAAVMNSYGSNPPTTTWKGMLSFPRTLALKQIGSKQYFLQQPVAELSTIDGSLTSIQNQTITPNQTLLSSIHGTSLDIRMAFVIDSGATLSLAVRKGGSEQTVIRYFQSNSTLSVDRTASGDISYDPAAGGVHTAQLAQDNTELVHIWALIDTCSVEVFGGEGEAVISDLIFPSNSSDGLSLEVSGGTAMLRSVNVSSVSL

SEQ ID NO: 3 - protein, 525 aa, Unknown
  Description of Unknown: Aspergillus oryzae sequence
MYIKPFILPALAAVAQAASYSGDLRPQTHFSPPSNFMNDPNGLFYDSKRGVYHLYYQYNPTATVAGNQHWGHATSPDLYHWTNQPIALAGDKPEEYIFSGSAVVDSNNTSGFFPDQDDGVIAIYTVDTPTLETQHIAYSRDGGYTFTKYENNPVNDIGSKQFRDPQVVWHPETQQWVMTIAYAQDLVIGFYTSPNLKDWTHASNFTQEGLPGDQFECPNLVKFSVDRAVSEETSKFVLFISVNPGAPLGGSGTFYVVGDFNGTHFTSEVAQETLFDFSKDNYAAQWYSGIPENEPPVSIGWASNWDYTEEVPTGPLEGWRSAMTLPRAHTLTKVNGVWTVTHSPFEGLSALKGRQLVSKSVHSGDVKANFSGVPSNAVYFDVTLKGIDVAKPTGRVNFNFTSSVSGEFLDGGVSLDDSSFWISRAGTHLFTIEDNGNYTSSSTTTISSFGNGTFSFSGVIDRSVFEVFLGQDGIQSGTMTFFPSSPLDTLAVSAEDLGDRASVSVKAWGLQSGWNSTTASKRFRA

SEQ ID NO: 4 - protein, 537 aa, Unknown
  Description of Unknown: Aspergillus niger sequence
MARLLKAVTVCALAGIAHAFNYDQPYRGQYHFSPQKNWMNDPNGLLYHNGTYHLFFQYNPGGIEWGNISWGHATSEDLTHWEEQPVALLARGYGSDVTEMYFSGSAVADVNNTSGFGKDGKTPLVAMYTSYYPVAQTLPSGQTVQEDQQSQSIAYSLDDGLTWTTYDAANPVIPNPPQPYQAQYQNFRDPFVFWHDESQKWVVVTSIAELHKLAIYTSDNLKDWKLVSEFGPYNAQGGVWECPGLFKLPLDGGSSTKWVITSGLNPGGPPGTVGSGTQYFVGEFDGTTFTPDADTVYPGNSTANWMDWGPDFYAAAGYNGLSIKDHVHIGWMNNWQYGANIPTYPWRSAMAIPRHLALKTINNKTTLVQQPQEAWSSISSKHPLYSRTYSTFSEGSTNASTTGETFRVDLSFSATSKASTFAIALRASANFTEQTLAGYDFAKQQIFLDRTKSGDVSFDNTFASVYHGPLVPDSTSMVRLSIFVDRSSVEVFGGQGETSLTAQIFPSNDAVHARLVSTGGATEDVRVDVHNITSTWN

SEQ ID NO: 5 - protein, 619 aa, Unknown
  Description of Unknown: Aspergillus oryzae sequence
MPVLAGCEGAAIPANLVSQTQSYNSNLIENSLSCEQQVTSSRHVLYSRPLFHLTAPRGWLNDPCGLGYDPATGLYHLSFQWNPKGNDWGNISWGHSVSQDLISWKTSPEPCLTPSAEYDSCGIFTGCFRPSDINGVAGALTYIYTSVRRLPLHYTLPYEVGSESLSIAVSRDNGVTWQRLDSNPILPAPPPDLNVTAWRDPYIGVWTAKQGEHDNDILPPLSLSGFLSGGIAGRTPTVFVYSVNPDDLREWTYVGPLVNVGLNFRPSRWSGDLGVNWETTNWVVLTDHEGTTKNFIIMGVEGCLVSEREQKRVSRSQLWMAVDPRPEQPKSEPIDALTDYAFSGIFDHGCAYAANSFWDPVTSQYIVYCWITEEDLPDGIRHRQGWSGVISLPRSLKLTTLRNVTKTRHSNLSDVTSIEKEANGEGSFTIRTLGVEPDQRLKKLRGEAQSITNVALWDRQHCGNYLSLTTSRWELEAEFAVGKLCKLVGIEFQHDLDPRNSTVLAWAPCSETFSIHRPPPYDPGINHNPEIAPHTLFTFADESGMEKEETLRIHAFLDRNVLEVFVNERTVISTRIYTPCVESVSRLRFFAELDPSAPNLKHAPAVLLKADLWDGLEAS

SEQ ID NO: 6 - protein, 556 aa, Kluyveromyces sp.
MKLAYSLLLPLAGVSASVINYKRDGDSKAITNTTFSLNRPSVHFTPSHGWMNDPNGLWYDAKEEDWHLYYQYNPAATIWGTPLYWGHAVSKDLTSWTDYGASLGPGSDDAGAFSGSMVIDYNNTSGFFNSSVDPRQRAVAVWTLSKGPSQAQHISYSLDGGYTFQHYSDNAVLDINSSNFRDPKVFWHEGENGEDGRWIMAVAESQVFSVLFYSSPNLKNWTLESNFTHHGWTGTQYECPGLVKVPYDSVADSSSNSSDSKPDSAWVLFVSINPGGPLGGSVTQYFVGDFNGTHFTPIDDQTRFLDMGKDYYALQTFFNTPNEKDVYGIAWASNWQYAQQAPTDPWRSSMSLVRQFTLKDFSTNPNSADVVLNSQPVLNYDALRKNGTTYSITNYTVTSENGKKIKLDNPSGSLEFHLEYVFNGSPDIKSNVFADLSLYFKGNNDDNEYLRLGYETNGGAFFLDRGHTKIPFVKENLFFNHQLAVTNPVSNYTTNVFDVYGVIDKNIIELYFDNGNVVSTNTFFFSTNNVIGEIDIKSPYDKAYTINSFNVTQFNV

SEQ ID NO: 7 - protein, 1311 aa, Lactobacillus crispatus
MSHKFNNYGLVTSFAAATLLSLCLTSNSNVKADTQSPVNIEQKNKSAELIKQNSDISTSAQQHNKNANGKTEDTSTQSTSTDLQNTNGKTEDTSTQSTSTDLQNTNTQKSFKNQSQEPESSTKAGEVKTLKDFTFSQNGKWSEQKDGIHSDARGQGDSFAYTKVKGDNFMYSADVVFQTNQGAAAITFRDNNDPDNKDGYAVNVDASSHKAKFWRWHDNKDYQLIDERDVKQTADNTYNLKVVANGHWLEYFVNDVLVASNGDYTLQKGDKGQPSVTNNGYFGLLNWNSNVIFKNVKYTKLDQSFTPLVSDITVTSDKGKVEEKGQFSPEQPIYIQYVDNDASTVNLKVKTDSPKAKVVAYDLNNNAYTDLKNIPVQVGANYLTVVSEVTASDGTKVESVYRINVHRLHPNENYYNELYRDQYHFSVKEGWSNDPNGLVYFNGKYHMFYQFYDDTIWGPMHWAHATSKDLIHWKNEPIALYPDANGAMFSGSIVVDKGNTSGLFDNDKGGLVALVTTDGNGQRIELAYSRDEGKTWDKLPNLVADWQKDPLQVQDFRDPKVFRWNDKWFMVLAGGPLRIYSSTNLQNWQVESEYSNINTECPDLYPIRANDGQLKWVLSRGGRFYKIGDFKEVNGKWSFIPDEAYKDQDGIMNFGKDSYAAMTYYQHSFGTEKDPTLPDIIEENWMNNWDYCNLVGNTVGQSFNGTYNLNLKVGLVKDGDKYLLTQTPIKAYEALRDNAHKVEYKDVTVTPNNDLFKNFKGDSYEIVSTFRPSKSTTKVGFNVRVGKGQATKVIYDLTTNKIYIDRSKSGVQINNKFSELNEQPVTRNADGSISLHLYVDRASVEAFTKGDTVLGANQIFPAPQSLGLQVVSEGGDSKADITLYPIKSVWTDKQKVNKPLEIVQVSPKEVRLNVGDSTTLTAYVMPGNVSQALDWSINDESLASITKDPESNSLKIVAKKAGTLTVTVKSHEDPSLSKTYKITILKNNFKTNIKDLKPLSGNWYVDDQDLHDENVSSNDYIMSPTKVSSSEYDMNLDVKYQKGLVNIFFASANEDPNGAYSLQLGGDKTLRLFRFYGDTITTTDLPAALNDGKLHHVAIHKTQNAVKVTIDGKEAMDYTFDKVDPGFNSAYVGLGLWDGAADFQNLYVKAATENDDNSSSSIDFNDQEIPNVSTDDNNSIIEKPSETVKTVVFTAKSLMHNAFVYDNQGKRIEKIVLKAGSVLKVGHIKLINHKRYYQLDNGKYIKAGNIDAYVRKLRRNAFVYNRAGKHIKKSLIRKGKKVKTYGSPVVIKGIKYYIVGNNRYIKAVNFM

SEQ ID NO: 8 - protein, 1612 aa, Unknown
  Description of Unknown: Aspergillus fumigatus sequence
MASPQQVYLLPLKDDGSPDVPGGYIYLPPPSDPAYLLRFVIEGSSSICREGTLWVNIPEAGKPFDRSAFRSFRLEPDFNKNIQLDVPVTCSGSFVFYTTFTPLPQFSVDPVPTPEPARTPDYYVDVAPRLTLRGKDLPLNALSIFSVLSKFMGKYPTDWDRHLNGISQRNYNMVHFTPLMKRGASNSPYSIFDQLQFDDGAFPNGEVDVAQMISKMEKEYGLLSLTDVVWNHTAHNSKWLEEHPEAGYSVETAPWLEAALELDTALLKFGRDLEELGLPTEFKTVNDLLAVMTALQEKVISGIRLWEYYVIDVTANAGHILENWKASELKHSASKKYAEVDISGFKDRPLKQQADLIRQHAIPTIKQVLGRFGRALDPEFGSLVLTAMFGKYDSSNSDIASIEKALVTILDEVNVPFYEEYNADVSEIMNQLFNRIKYIRIDDHGPKLGPVTDENPLIETYFTRLPLNDITKKHSPKALALVNNGWIWNADAMRDNAGPESKAYLRREVIVWGDCVKLRYGSSPEDNPFLWDYMAKYTRLMAKHFSGFRIDNCHSTPLAVAEYLLDEARKVRPNLTVFAELFTGSEEADYIFVKRLGINALIREAMQAWSTGELSRLVHRHGGHPIGSFDVELPSAGSSHAIASAGVNQNQEKISHIRPCPVQALFMDCTHDNETPAQKRDARDTLPNAALVSMCASAVGSVMGYDEIYPKLVDLVHEKRLYFSEFSQSAEVRHDCERGGIGGVKKLLNELHAMMGVEGYDETHIHHDGEYITVHRVHPKTRRGIFLIAHTAFPGHSTNAVLAPTHLVGTQAKHIGTWNLEVDASDSMRAVILSDKDHLRGLPSRIRKFEGTKAEQQGDDTVISVLDTFAPGSIALFETSIAKAEHAAGLENNITEGVDEAFAELSLVDLNFVLYRCDAEERDLSGGQDGVYNVPNHGPLVYAGLQGWWSVLEDIIKYNALGHPLCDHLRHGHWALDFIVGRMERAAKKEGYTALEKPAKWLHEKFQAVRDLPSFLLPRYFGIIIQVAYNAAWKRGIQLLGPDVRQGQEFIHQLGMVSVQVTGLVKSASLWPTKTVPSLAAGLPHFAVDWARCWGRDIFISLRGLFLCTGRFDDAKEHILAFASVLKHGMIPNLLSSGKLPRYNSRDSVWFFLQAIQDYTKMAPNGIEILNETVARRFVPYDDTWFAYDDPRAYSKHSTISEVIQEVLQRHAHGLSFREYNAGPDLDMQMKPEGFQIDVKVDWETGIIFGGSQHNCGTWQDKMGESGKAGNKGVPGTPRDGAAIEITGLLYSALTWVARLHERGLYPHDKVDIAEGRSITFKEWAAKIKQNFERCYYVPESPEEDGQYDVDPSVVNRRGIYKDLYKSGKPYEDYQLRANFPIAMTVSPDLFTPSKALGALALADSVIVGPIGVATLDPSDLNYNPNYNNSEDSDNFATAKGRNYHQGPEWVWQRGFFLRAFLHFDLERRKTAEERTEAYQQVTRRLEGCKRALRESPWKGLTELTNKNGAHCADSVRCLPYLLYFHTRKLMQFCYSVPLSHGRQVAYLTYIMTPPDMEFCERSFDIDDLLKRIGYTVCIFKVDKVMISVYHRRYSQSHTFISFMEVVHYLCA

SEQ ID NO: 9 - protein, 1536 aa, Saccharomyces cerevisiae
MNRSLLLRLSDTGEPITSCSYGKGVLTLPPIPLPKDAPKDQPLYTVKLLVSAGSPVARDGLVWTNCPPDHNTPFKRDKFYKKIIHSSFHEDDCIDLNVYAPGSYCFYLSFRNDNEKLETTRKYYFVALPMLYINDQFLPLNSIALQSVVSKWLGSDWEPILSKIAAKNYNMVHFTPLQERGESNSPYSIYDQLQFDQEHFKSPEDVKNLVEHIHRDLNMLSLTDIVFNHTANNSPWLVEHPEAGYNHITAPHLISAIELDQELLNFSRNLKSWGYPTELKNIEDLFKIMDGIKVHVLGSLKLWEYYAVNVQTALRDIKAHWNDESNESYSFPENIKDISSDFVKLASFVKDNVTEPNFGTLGERNSNRINVPKFIQLLKLINDGGSDDSESSLATAQNILNEVNLPLYREYDDDVSEILEQLFNRIKYLRLDDGGPKQGPVTVDVPLTEPYFTRFKGKDGTDYALANNGWIWNGNPLVDFASQNSRAYLRREVIVWGDCVKLRYGKSPEDSPYLWERMSKYIEMNAKIFDGFRIDNCHSTPIHVGEYFLDLARKYNPNLYVVAELFSGSETLDCLFVERLGISSLIREAMQAWSEEELSRLVHKHGGRPIGSYKFVPMDDFSYPADINLNEEHCFNDSNDNSIRCVSEIMIPKILTATPPHALFMDCTHDNETPFEKRTVEDTLPNAALVALCSSAIGSVYGYDEIFPHLLNLVTEKRHYDISTPTGSPSIGITKVKATLNSIRTSIGEKAYDIEDSEMHVHHQGQYITFHRMDVKSGKGWYLIARMKFSDNDDPNETLPPVVLNQSTCSLRFSYALERVGDEIPNDDKFIKGIPTKLKELEGFDISYDDSKKISTIKLPNEFPQGSIAIFETQQNGVDESLDHFIRSGALKATSSLTLESINSVLYRSEPEEYDVSAGEGGAYIIPNFGKPVYCGLQGWVSVLRKIVFYNDLAHPLSANLRNGHWALDYTISRLNYYSDEAGINEVQNWLRSRFDRVKKLPSYLVPSYFALIIGILYGCCRLKAIQLMSRNIGKSTLFVQSLSMTSIQMVSRMKSTSILPGENVPSMAAGLPHFSVNYMRCWGRDVFISLRGMLLTTGRFDEAKAHILAFAKTLKHGLIPNLLDAGRNPRYNARDAAWFFLQAVQDYVYIVPDGEKILQEQVTRRFPLDDTYIPVDDPRAFSYSSTLEEIIYEILSRHAKGIKFREANAGPNLDRVMTDKGFNVEIHVDWSTGLIHGGSQYNCGTWMDKMGESEKAGSVGIPGTPRDGAAIEINGLLKSALRFVIELKNKGLFKFSDVETQDGGRIDFTEWNQLLQDNFEKRYYVPEDPSQDADYDVSAKLGVNRRGIYRDLYKSGKPYEDYQLRPNFAIAMTVAPELFVPEHAIKAITIADEVLRGPVGMRTLDPSDYNYRPYYNNGEDSDDFATSKGRNYHQGPEWVWLYGYFLRAFHHFHFKTSPRCQNAAKEKPSSYLYQQLYYRLKGHRKWIFESVWAGLTELTNKDGEVCNDSSPTQAWSSACLLDLFYDLWDAYEDDS

SEQ ID NO: 10 - protein, 2359 aa, Unknown
  Description of Unknown: Aspergillus niger sequence
MSSPQQVYLLPLKDDGSPDVPGGYLYLPSPTDPPYLLRFVIEGSSSICREGALWVNIPEKGESFNRSAFRSFSLSPDFNKNIQIDIPITSAGSFAFYVTFSPLPEFSVLSTPTPEPTRTPTHYIDVSPKLTLRGQDLPLNALSIYSVISKFMGQYPKDWEKHLNGISQRNYNMVHFTPLMKRGASNSPYSIFDQLQFDDAVFPNGEDDVARLVSKMEDEYGLLSLTDVVWNHTAHNSKWLEEHPEAGYSVETAPWLEAALELDTALLKFGQELSTLGLPTEFHTVDELMEVMNAMRDKVISGIRLWEFYAIDVKADTQRILDQWKTSKDLNLTDKKWAQLNLSDYKNWTLKQQATFIREYAIPTSKQVLGRFSRAVDLHFGAAILTALFGPHDSPTSDTNTVEESLSKILDEVNLPFYEEYDGDVSEIMNQVFNRIKYLRIDDHGPKLGAVTAQSPLIETYFTRLPLNDVTKKHKKGALALVNNGWIWNADALRDNAGPDSRAYLRREVIVWGDCVKLRYGSCRDDNPFLWDFMTDYTRLMAKYFSGFRIDNCHSTPLVVAEYLLDEARKVRPNLTVFAELFTGSEEADYIFVKRLGINALIREAMQAWSTGELSRLVHRHGGRPIGSFDLDLPSSGSSHAIASSGLDSGKEKVAHIRPTPVQALFMDCTHDNEMPAQKRTAKDTLPNGALVAMCASAIGSVIGYDEVYPRLVDLVHEHRLYFSEFSEAPETGLNSLEGGIGGIKKLLNDLHTRMGVEEYDETHIHHDGEYITVHRVHPRTRKGVFLIAHTAFSGQDGKSVLAPTHLVGTHVKHIGTWLLEVDASQTTKERIQTDKSYLRGLPSQVKTFEGTKIEESGKDTIISVLDSFVAGSIALFETSMPSVEHASGLDNYITEGVDHAFSDLSLVDLNFALYRCEAEERDSSKGQDGVYDIPGHGPLVYAGLQGWWSVLENIIKYNELGHPLCDHLRNGQWALDYIVARLEKLGHTDEHTALGRPAAWLQEKFQAVRQLPSFLLPRYFAIIVQVAYNAAWKRGIQLLGPHIQNGQEFIHQLGMVSVQQTGYVNSASLWPTKKVPSLAAGLPHFAVDWARCWGRDVFISLRGLLLCTSRFEDAKEHITAFASVLKHGMIPNLLSSGKLPRYNSRDSVWFFLQSIQDYTKMAPDGLRLLDHNVPRRFLPYDDVWFPYDDPRAYSQHSTISEIIQEVLQRHAQGLSFREYNAGPDLDMQMTQEGFQIDVKVDWETGLIFGGSQYNCGTWQDKMGESAKAGNKGVPGTPRDGAAIEITGLVYSALTWVAELHERGLYKHDGVDIGDGKSISFKEWASRIQANFERCYYVPLQPKDDGQYDIDANIINRRGIYKDLYRSGKPYEDYQLRSNFPIAMTVAPDLFTSSKALAALALADEVLVGPVGMATLDPSDLNYRPNYNNSEDSTDFATAKGRNYHQGPEWVWQRGYFLRAFLHFDLARRTTPAERTETYQQITRRLEGCKRALRESPWKGLTELTNKNGAHCADSNICFWSVMSLTESAAAAMLTAAVVVDSPIDVHEPRWDDQTRGRDLYTQLVISLLVGLSAFFSFCVLRPKWTELYAARRRQRCAASYLPELPDSFFGWIPVLYRITDEQVLESAGLDAFVFLTFLKFAIRFLSAIFFFALVIILPTHYKNTGKSGVPGWDDDDDETFDGDKDKKKIISDPNYLWMYVIFTYIFTGLAVYMLIQETNKVIRTRQKYLGSQTSTTDRTIRLSGIPPDLGTEEKIKDFMEGLKVGKVESVTLCRDWRELDHLIDERLKLLRNLERAWTRHLGYKRVKASPNALTLMHQQPRGSSIVSDGESERIQLLSEGGRDHVTDYAHKRPTVRIWYGPFKLRYKNIDAIDYYEEKLRRLDEKIQVARQKEYPPTEVAFVTMESIAASQMVVQAILDPHPMQLLARLAPAPADVVWKNTYLPRSRRMMQSWFITVVIGFLTVFWSVLLIPVAYLLEYETLHKVFPQLADALARNPLAKSLVQTGLPTLVLSLLTVAVPYLYNWLSNQQGMMSRGDIELSVISKTFFFSFFNLFLVFTVFGTATTFYGFWENLRDAFKDATTIAFALAKTLENFAPFYINFLCLQGIGLFPFRLLEFGSVAMYPINFLAAKTPRDYAELSTPPTFSYGYSIPQTVLSLIICVVYSVFPSSWLICLFGLIYFTIGKFIYKYQLLYAMDHQQHSTGRAWPMICSRILMGLIVFQLAMIGVLALRRAITRSLLIVPLLMATVWFSYFFARTYEPLMKFIALKSIDRERPGGGDISPSPSSTFSPPSGLDRDSFPIRIGGQELGLRLRKYVNPSLILPLHDAWLPGRTMVPELQGELEHRNSENNAADESV

SEQ ID NO: 11 - protein, 537 aa, Unknown
  Description of Unknown: Aspergillus niger sequence
MNQGTKSILLAATLAAIPWQVYGSIEQSSLLPIPPMGFNNWARFMCDLNETLFTETADAMAANGLRDAGYNRINLDDCWMAYQRSDNGSLQWNTTKFPHGLPWLAQYVKAKGFHFGIYEDSGNMTCGGYPGSYNHEEQDANTFALWGIDYLKLDGCNVYATQGRTLEEEYKQRYGHWHQVLSKMQHPLIFSESAPAYFAGTDNNTDWYTVMDWVPIYGELARHSTDILVYSGAGSAWDSIMNNYNYNTLLARYQRPGYFNDPDFLIPDHPGLTADEKRSHFALWASFSAPLIISAYIPALSKDEIAFLTNEALIAVNQDPLAQQATFASRDNTLDILTRNLANGDRLLTVLNKGNTTVTRDIPVQWLGLTETDCTYTAEDLWDGKTQKISDHIKIELASHATAVFRLGLPQGCSSVVPTGLVFNTASGNCLTAASNSSVAFQSCNGETSQIWQVTLSGVIRPVSQTTQCLAADGNSVKLQACDSTDSDGQNWTYAVTGNLKNAKTDGCLTEGSVQMKSCLYERDGQVFGLPSGVQLS

SEQ ID NO: 12 - protein, 443 aa, Unknown
  Description of Unknown: Aspergillus niger sequence
MRWLLTSSALLVPAAALVRPDGVGRTPALGWNSWNAYSCDIDADKIVTAANEVVNLGLKDLGYEYINIDDCWSVKSGRNTTTKRIIPDPDKFPNGISGVADQVHALGLKLGIYSSAGLTTCAGYPASLGYEEIDAQSFAEWGIDYLKYDNCGVPTNLTDQYTYCVPDSTDGSNYPNGTCVNLTDAAPQGYDWATSTTAKRYQRMRDALLSVNRTILYSLCDWGQADVNAWGNATGNSWRMSGDITATWSRIAEIANENSFLMNYANFWGYPDPDMLEVGNGNLTLPENRAHFALWAMMKAPLIIGTPLDSIDTSHLTILSNKPLLTFHQDAVIGRPAYPYKWGYNPDWTFDPEHPAEYWSGPTSSGEVFVLMLNSEGEVKTRSAVWEEVPELKDRGTKKNSKEKKGFKVTDAWTGKDLGCVKDKYEVKLQAHDVAVLVVGGQC

SEQ ID NO: 13 - protein, 985 aa, Unknown
  Description of Unknown: Aspergillus niger sequence
MVKLTHLLARAWLVPLAYGASQSLLSTTAPSQPQFTIPASADVGAQLIANIDDPQAADAQSVCPGYKASKVQHNSRGFTASLQLAGRPCNVYGTDVESLTLSVEYQDSDRLNIQILPTHVDSTNASWYFLSENLVPRPKASLNASVSQSDLFVSWSNEPSFNFKVIRKATGDALFSTEGTVLVYENQFIEFVTALPEEYNLYGLGEHITQFRLQRNANLTIYPSDDGTPIDQNLYGQHPFYLDTRYYKGDRQNGSYIPVKSSEADASQDYISLSHGVFLRNSHGLEILLRSQKLIWRTLGGGIDLTFYSGPAPADVTRQYLTSTVGLPAMQQYNTLGFHQCRWGYNNWSDLADVVANFEKFEIPLEYIWTDIDYMHGYRNFDNDQHRFSYSEGDEFLSKLHESGRYYVPIVDAALYIPNPENASDAYATYDRGAADDVFLKNPDGSLYIGAVWPGYTVFPDWHHPKAVDFWANELVIWSKKVAFDGVWYDMSEVSSFCVGSCGTGNLTLNPAHPSFLLPGEPGDIIYDYPEAFNITNATEAASASAGASSQAAATATTTSTSVSYLRTTPTPGVRNVEHPPYVINHDQEGHDLSVHAVSPNATHVDGVEEYDVHGLYGHQGLNATYQGLLEVWSHKRRPFIIGRSTFAGSGKWAGHWGGDNYSKWWSMYYSISQALSFSLFGIPMFGADTCGFNGNSDEELCNRWMQLSAFFPFYRNHNELSTIPQEPYRWASVIEATKSAMRIRYAILPYFYTLFDLAHTTGSTVMRALSWEFPNDPTLAAVETQFMVGPAIMVVPVLEPLVNTVKGVFPGVGHGEVWYDWYTQAAVDAKPGVNTTISAPLGHIPVYVRGGNILPMQEPALTTREARQTPWALLAALGSNGTASGQLYLDDGESIYPNATLHVDFTASRSSLRSSAQGRWKERNPLANVTVLGVNKEPSAVTLNGQAVFPGSVTYNSTSQVLFVGGLQNLTKGGAWAENWVLEW

SEQ ID NO: 14 - protein, 677 aa, Unknown
  Description of Unknown: Aspergillus niger sequence
MIGLPMLWCLGLFTLYGHSADTPATGVSNPQTIVTNGTSFRLNGDNVSYRFHVNSTTGDLISDHFGGVVSGTIPSPVEPAVNGWVGMPGRIRREFPDQGRGDFRIPAVRIRESAGYTAVTTLVVHLYDNYSSVAADLSYSIFPKYDAIVRSVNVINQGPGNITIEALASISIDFPYEDLDMVSLRGDWAREANVQRSKVQYGVQGFGSSTGYSSHLHNPFLAIVDPATTESQGEAWGFNLVYTGSFSAQVEKGSQGFTRALLGFNPDQLSWNLGPGETLTSPECVAVYSDKGLGSVSRKFHRLYRNHLMKSKFATSDRPVLLNSWEGVYFDYNQSSIETLAEESAALGVHLFVMDDGWFGDKYPRVSDNAGLGDWMPNPARLPDGLTPVVQDITNLTVNGTESTKLRFGIWVEPEMVNPNSTLYHEHPEWALHAGPYPRTERRNQLVLNLALPAVQDFIIDFMTNLLQDTGISYVKWDNNRGIHETPSPSTDHQYMLGLYRVFDTLTTRFPDVLWEGCASGGGRFDAGMLQYVPQIWTSDNTDAIDRITIQFGTSLAYPPSAMGAHLSAVPNAQTGRTVPITFRAHVAMMGGSFGLELDPATVEGDEIVPELLALAEKVNPIILNGDLYRLRLPQDSQWPAALFVTQDGAQAVLFYFQVPAECQPCRAVGQAAGVGP

SEQ ID NO: 15 - protein, 1005 aa, Unknown
  Description of Unknown: Aspergillus niger sequence
MKLLSVAAVALLAAQAAGASIKHRLNGFTILEHPDPAKRDLLQDIVTWDDKSLFINGERIMLFSGEVHPFRLPVPSLWLDIFHKIRALGFNCVSFYIDWALLEGKPGDYRAEGIFALEPFFDAAKEAGIYLIARPGSYINAEVSGGGFPGWLQRVNGTLRSSDEPFLKATDNYIANAAAAVAKAQITNGGPVILYQPENEYSGGCCGVKYPDADYMQYVMDQARKADIVVPFISNDASPSGHNAPGSGTGAVDIYGHDSYPLGFDCANPSVWPEGKLPDNFRTLHLEQSPSTPYSLLEFQAGAFDPWGGPGFEKCYALVNHEFSRVFYRNDLSFGVSTFNLYMTFGGTNWGNLGHPGGYTSYDYGSPITETRNVTREKYSDIKLLANFVKASPSYLTATPRNLTTGVYTDTSDLAVTPLIGDSPGSFFVVRHTDYSSQESTSYKLKLPTSAGNLTIPQLEGTLSLNGRDSKIHVVDYNVSGTNIIYSTAEVFTWKKFDGNKVLVLYGGPKEHHELAIASKSNVTIIEGSDSGIVSTRKGSSVIIGWDVSSTRRIVQVGDLRVFLLDRNSAYNYWVPELPTEGTSPGFSTSKTTASSIIVKAGYLLRGAHLDGADLHLTADFNATTPIEVIGAPTGAKNLFVNGEKASHTVDKNGIWSSEVKYAAPEIKLPGLKDLDWKYLDTLPEIKSSYDDSAWVSADLPKTKNTHRPLDTPTSLYSSDYGFHTGYLIYRGHFVANGKESEFFIRTQGGSAFGSSVWLNETYLGSWTGADYAMDGNSTYKLSQLESGKNYVITVVIDNLGLDENWTVGEETMKNPRGILSYKLSGQDASAITWKLTGNLGGEDYQDKVRGPLNEGGLYAERQGFHQPQPPSESWESGSPLEGLSKPGIGFYTAQFDLDLPKGWDVPLYFNFGNNTQAARAQLYVNGYQYGKFTGNVGPQTSFPVPEGILNYRGTNYVALSLWALESDGAKLGSFELSYTTPVLTGYGNVESPEQPKYEQRKGAY

SEQ ID NO: 16 - protein, 357 aa, Homo sapiens
MAAAAKPNNLSLVVHGPGDLRLENYPIPEPGPNEVLLRMHSVGICGSDVHYWEYGRIGNFIVKKPMVLGHEASGTVEKVGSSVKHLKPGDRVAIEPGAPRENDEFCKMGRYNLSPSIFFCATPPDDGNLCRFYKHNAAFCYKLPDNVTFEEGALIEPLSVGIHACRRGGVTLGHKVLVCGAGPIGMVTLLVAKAMGAAQVVVTDLSATRLSKAKEIGADLVLQISKESPQEIARKVEGQLGCKPEVTIECTGAEASIQAGIYATRSGGNLVLVGLGSEMTTVPLLHAAIREVDIKGVFRYCNTWPVAISMLASKSVNVKPLVTHRFPLEKALEAFETFKKGLGLKIMLKCDPSDQNP

SEQ ID NO: 17 - protein, 357 aa, Rattus norvegicus
MAAPAKGENLSLVVHGPGDIRLENYPIPELGPNDVLLKMHSVGICGSDVHYWEHGRIGDFVVKKPMVLGHEAAGTVTKVGPMVKHLKPGDRVAIEPGVPREIDEFCKIGRYNLTPSIFFCATPPDDGNLCRFYKHSADFCYKLPDSVTFEEGALIEPLSVGIYACRRGSVSLGNKVLVCGAGPIGIVTLLVAKAMGASQVVVIDLSASRLAKAKEVGADFTIQVAKETPHDIAKKVESVLGSKPEVTIECTGAESSVQTGIYATHSGGTLVVVGMGPEMINLPLVHAAVREVDIKGVFRYCNTWPMAVSMLASKTLNVKPLVTHRFPLEKAVEAFETAKKGLGLKVMIKCDPNDQNP

SEQ ID NO: 18 - protein, 356 aa, Ovis aries
MAAAKPENLSLVVHGPGDLRLENYPIPEPGPNEVLLKMHSVGICGSDVHYWQHGRIGDFVVKKPMVLGHEASGTVVKVGSLVRHLQPGDRVAIEPGAPRETDEFCKIGRYNLSPTIFFCATPPDDGNLCRFYKHNANFCYKLPDNVTFEEGALIEPLSVGIHACRRAGVTLGNKVLVCGAGPIGLVNLLAAKAMGAAQVVVTDLSASRLSKAKEVGADFILQISNESPQEIAKKVEGLLGSKPEVTIECTGVETSIQAGIYATHSGGTLVLVGLGSEMTSVPLVHAATREVDIKGVFRYCNTWPMAISMLASKSVNVKPLVTHRFPLEKALEAFETSKKGLGLKVMIKCDPSDQNP

SEQ ID NO: 19 - protein, 417 aa, Streptomyces griseoflavus
MTESVTNWAGNITYAAKELHRPHGMDALRDLVAGSPRVRVLGSGHSFNEIAEPGEDGVLLSLDALPPGIEVDTAARTVRVGGGVRYAELAREVHRHGLALANMASLPHISVAGSVATGTHGSGVGNGPLASSVRAVEIVAADGSTVTLARGDERFGGAVTSLGALGVVTSLTLDLEPAFEVEQHVFTEMPLDGLDRAAFETVMSAAYSVSLFTDWRAPGFRQVWVKRRTDQPLPDFARAAPATEKTHPVPGMPAVNCTEQFGVPGPWHERLPHFRAEFTPSSGAELQSEYLMPRESAVAALHALDGIRETVAPVLQTCEVRTVAADGQWLSPSYGRDTVAVHFTWVEDTRAALPVVARVEEALAPFDPRPHWGKVFTTPAAELRARYPRLDDFRKCVEHLDPRRKFTNAFVRDVLGE

SEQ ID NO: 20 - protein, 491 aa, Pseudomonas fluorescens
MKLNQQNLDRLAAEVKLPAYSLSETRQGIAHIGVGGFHRAHQAYYTDALMNTGEALDWAICGVGLRAEDRRARDDLKEQDYLFTLFELGDSDDTEVRVIGAIRDMLLAEDSAQALIDKLADPQIRIVSLTITEGGYCIDDSNGEFMAHLPQIQHDLTNPQQPKTVFGFLCAALAKRRAAGTPAFTVMSCDNLPHNGAVTRKALLAFTALLDPDLHDWIDANVSFPNAMVDRITPMTSTAHRLQLADKHAVDDAWPVVCEPFVQWVLEDKFVNGRPAWEKVGVQFTDDVSPYEEMKIKLLNGSHLALTYLGFLKGYRFVHETMNDPLFVRYMRAYMDLDVTPQLAPVPGIDLTEYKDTLVARFSNQAIADQLERVCSDGSSKFPKFTIPTINRLIADGRETKRAALVVAAWALYLKGVDENGDTYSIPDPRAAFCQGLVAEDALITERLLGVEEIFGVAIPRSPEFVAAFEWCLNSLREEGVTRTLEKILVA

SEQ ID NO: 21 - protein, 228 aa, Escherichia coli
MEDNFVAGRPEWEKAGAELVSDVLPYEELKLRMLNGSHSFLAYLGYLAGYQHINDCMEDEHYRHAAYGLMLQEQAPTLKVQGVDLQDYANRLIARYSNPALRHRTWQIAMDGSQKLPQRMLDSVRWHLAHDSKFDLLALGVAGWMRYVGGVDEQGNPIEISDPLLPVIQKAVQSSAEGKARVQSLLAIKAIFGDDLPDNSLFTAKVTEAYLSLLAHGAKATVAKYSVK

SEQ ID NO: 22 - protein, 251 aa, Escherichia coli
MGNNLLSAKATLPVYDRNNLAPRIIHLGFGAFHRAHQGVYADILATEHFSDWGYYEVNLIGGEQQIADLQQQDNLYTVAEMSADAWTARVVGVVKKALHVQMDGLETVLAAMCEPQIAIVSLTITEKGYFHSPATGQLMLDHPMVAADVQNPHQPKTATGVIVEALARRKAAGLPAFTVMSCDNMPENGHVMRDVVTSYAKAVDVKLAQWIEDNVTFPSTMVDRIVPAVTEDTLAKIEQLTGCGRSCGRCL

SEQ ID NO: 23 - protein, 338 aa, Leuconostoc mesenteroides
MEALVLTGTKKLEVKSIEKPEVKPNEVLIHTAFAGICGTDHALYAGLPGSADAVPPIVLGHENSGVVAEIGSSVTNVKVGDRVTVDPNIYCGQCKYCRTGRPELCENLSAVGVTRNGGFEEYFTAPASVVYQIPDNVSLKSAAVVEPISCAVHGIKLLKVTPYQKALVIGDGFMGELFVQLLQAYGIHQVDLAGIVPEKLAMNKENFGVKNTYNTKDGDKIPEGAYDVVVEAVGLPQTQEAAIEASARGAQVLMFGVGGPDAKFQMNTYEVFQKQLTIQGSFINPNAFEDSLALLSSGKLNVEDLMSHELDYKTVDDFVNGKLGVVSKAVVKVGGEEA

SEQ ID NO: 24 - protein, 338 aa, Leuconostoc mesenteroides
MEALVLTGTKKLEVKDIDRPKVLPNEVLIHTAFAGICGTDHALYAGLPGSADAVPPIVLGHENSGVVAEVGSAVTNVKVGDRVTVDPNIYCGQCKYCRTARPELCENLSAVGVTRDGGFEEFFTAPASVVYPIPDNVSLKSAAVVEPISCAVHGIQLLKVTPYQKALVIGDGFMGELFVQILQAYGIHQVDLAGIVDEKLAMNKEKFGVKNTYNTMKGDKIPEGKYDVIIEAVGLPQTQEAAIEASARGAQVLMFGVGGPDAKFQMNTYEVFQKQLTIQGSFINPNAFEDSLALLSSGKLNVEALMSHELDYKTVDDFVNGKLGVVSKAVVKVGGEEA

SEQ ID NO: 25 - protein, 502 aa, Saccharomyces cerevisiae
MTKSDETTATSLNAKTLKSFESTLPIPTYPREGVKQGIVHLGVGAFHRSHLAVFMHRLMQEHHLKDWSICGVGLMKADALMRDAMKAQDCLYTLVERGIKDTNAYIVGSITAYMYAPDDPRAVIEKMANPDTHIVSLTVTENGYYHSEATNSLMTDAPEIINDLNHPEKPDTLYGYLYEALLLRYKRGLTPFTIMSCDNMPQNGVTVKTMLVAFAKLKKDEKFAAWIEDKVTSPNSMVDRVTPRCTDKERKYVADTWGIKDQCPVVAEPFIQWVLEDNFSDGRPPWELVGVQVVKDVDSYELMKLRLLNGGHSAMGYLGYLAGYTYIHEVVNDPTINKYIRVLMREEVIPLLPKVPGVDFEEYTASVLERFSNPAIQDTVARICLMGSGKMPKYVLPSIYEQLRKPDGKYKLLAVCVAGWFRYLTGVDMNGKPFEIEDPMAPTLKAAAVKGGKDPHELLNIEVLFSPEIRDNKEFVAQLTHSLETVYDKGPIAAIKEILDQV

SEQ ID NO: 26 - protein, 491 aa, Gluconobacter oxydans
MILTSQTLSHLPDSILTSSYDRDAVTPGIVHLSVGNFHRAHQAVYTDRALALAGQSGWGIVGMGLMDHPAEVAKAEALHAQNGLYTLRECPPNRPDTVRVVKSLVEYIHAPADRDAALKRLTDPAIRIVSMTVTEGGYYMDEAGRFMTEHPAIAEDLHRPVPHTAFGLMTEALRQRRDAGVAPFTILSCDNVPANGDVARNAVLSFARLRDAELAEWIEVNVAFPSCMVDRITPAVHPADVARLDAQSGIEDRVPVFCEDFIQWVVEDHFPAGRPAWEEVGVLFTDDVEPYEQVKLRMLNASHSTLALPGVLMGYRLVDEAMGDEHLAALLEQFLRHDVEPQLTAPPGISLPDYAAQLLQRFRNHAVSDQLLRITSDSTSKLPVFLRATAEDVLKKAQDPRRIAFVLACYCAYLTGRDDVEATFAVTEPRLSAEDRALALDANPAKALEMSVFAGWGLENSAEFLTRFIQTREDLKTRGTAAVLKDLVTNV

SEQ ID NO: 27 - protein, 388 aa, Streptomyces murinus
MSFQPTPEDRFTFGLWTVGWQGRDPFGDATRPALDPVETVQRLAELGAYGVTFHDDDLIPFGSSDTERESHIKRFRQALDATGMTVPMATTNLFTHPVFKDGGFTANDRDVRRYALRKTIGNIDLAAELGAKTYVAWGGREGAESGGAKDVRDALDRMKEAFDLLGEYVTAQGYDLRFAIEPKPNEPRGDILLPTVGHALAFIERLERPELYGVNPEVGHEQMAGLNFPHGIAQALWAGKLFHIDLNGQSGIKYDQDLRFGAGDLRAAFWLVDLLETAGYEGPRHFDFKPPRTEDFDGVWASAAGCMRNYLILKDRAAAFRADPEVQEALRAARLDQLAQPTAADGLDALLADRAAFEDFDVDAAAARGMAFEHLDQLAMDHLLGARG

SEQ ID NO: 28 - protein, 407 aa, Unknown
  Description of Unknown: Thermobifidia fusca sequence
MTLWTARAAHRAWLDAEARRLVDFAAAADHPEHGFAWLDGSGAPLPEQGVHTWITCRVTHVAALAHLEGIPGASALADHGLRALAGPLRDPEHDGWFTALDSRGTVADSRKEAYQHAFVLLAAASATVAGRPGARELLDAAAAVIEQRFWEEETGRCRESWDAAWHADEPYRGANSNMHLVEAFLAAFDATGDRVWAERALRIAHFFVHEVAAPRDWRLPEHFTPDWQVVADYNTDDRAHPFRPYGVTVGHVLEWARLLVHVEAALPDPPSWLLADAEAMFAAAVARGWSVDGTEGFVYTLDYDDTPVVRSRMHWVVAEAISAAAVLGQRTGDERYEHWYRTWWDHAATYFVDTVQGSWHHELDPTLAPPPGGTWSGKPDVYHAYQATRLPLLPLAPSLAGALATVG

SEQ ID NO: 29 - protein, 555 aa, Kluyveromyces sp.
MKLAYSLLLPLAGVSASVINYKRDGDSKAITNTTFSLNRPSVHFTPSHGWMNDPNGLWYDAKEEDWHLYYQYNPAATIWGTPLYWGHAVSKDLTSWTDYGASLGPGSDDAGAFSGSMVIDYNNTSGFFNSSVDPRQRAVAVWTLSKGPSQAQHISYSLDGGYTFQHYSDNAVLDINSSNFRDPKVFWHEGENGEDGRWIMAVAESQVFSVLFYSSPNLKNWTLESNFTITVWTGTQYECPGLVKVPYDSVADSSNSSDSKPDSAWVLFVSINPGGPLGGSVTQYFVGDFNGTHFTPIDDQTRFLDMGKDYYALQTFFNTPNEKDVYGIAWASNWQYAQQAPTDPWRSSMSLVRQFTLKDFSTNPNSADVVLNSQPVLNYDALRKNGTTYSITNYTVTSENGKKIKLDNPSGSLEFHLEYVFNGSPDIKSNVFADLSLYFKGNNDDNEYLRLGYETNGGAFFLDRGHTKIPFVKENLFFNHQLAVTNPVSNYTTNVFDVYGVIDKNIIELYFDNGNVVSTNTFFFSTNNVIGEIDIKSPYDKAYTINSFNVTQFNL

SEQ ID NO: 30 - protein, 678 aa, Unknown
  Description of Unknown: Aspergillus luchuensis sequence
MQGSSLESSQFCNTYTGLLCRLRLGFTNAVPDVSPHSAKPRSPGPIEGFVEWAPGVYRCYTPQYLVNFTEQRLKFHRGSVDRWADILGLGAGIRSIPSVDPTPFNDRLGVHWRTYKPGHSMPEIPETILSHSAVFSKGSLAMAPLSKALSVFMLMGITYAFNYDQPYRGQYHFSPQKNWMNDPNGLLYHNGTYHLFFQYNPGGIEWGNISWGHAISEDLTHWEEKPVALLARGFGSDVTEMYFSGSAVADVNNTSGFGKDGKTPLVAMYTSYYPVAQTLPSGQTVQEDQQSQSIAYSLDDGLTWTTYDAANPVIPNPPSPYEAEYQNFRDPFVFWHDESQKWVVVTSIAELHKLAIYTSDNLKDWKLVSEFGPYNAQGGVWECPGLVKLPLDSGNSTKWVITSGLNPGGPPGTVGSGTQYFVGEFDGTTFTPDADTVYPGNSTANWMDWGPDFYAAAGYNGLSLNDHVHIGWMNNWQYGANIPTYPWRSAMAIPRHMALKTIGSKATLVQQPQEAWSSISNKRPIYSRTFKTLSEGSTNTTTTGETFKVDLSFSAKSKASTFAIALRASANFTEQTLVGYDFAKQQIFLDRTHSGDVSFDETFASVYHGPLTPDSTGVVKLSIFVDRSSVEVFGGQGETTLTAQIFPSSDAVHARLASTGGTTEDVRADIYKIASTWN

SEQ ID NO: 31 - protein, 537 aa, Unknown
  Description of Unknown: Aspergillus luchuensis sequence
MAPLSKALSVFMLMGITYAFNYDQPYRGQYHFSPQKNWMNDPNGLLYHNGTYHLFFQYNPGGIEWGNISWGHAISEDLTHWEEKPVALLARGFGSDVTEMYFSGSAVADVNNTSGFGKDGKTPLVAMYTSYYPVAQTLPSGQTVQEDQQSQSIAYSLDDGLTWTTYDAANPVIPNPPSPYEAEYQNFRDPFVFWHDESQKWVVVTSIAELHKLAIYTSDNLKDWKLVSEFGPYNAQGGVWECPGLVKLPLDSGNSTKWVITSGLNPGGPPGTVGSGTQYFVGEFDGTTFTPDADTVYPGNSTANWMDWGPDFYAAAGYNGLSLNDHVHIGWMNNWQYGANIPTYPWRSAMAIPRHMALKTIGSKATLVQQPQEAWSSISNKRPIYSRTFKTLSEGSTNTTTTGETFKVDLSFSAKSKASTFAIALRASANFTEQTLVGYDFAKQQIFLDRTHSGDVSFDETFASVYHGPLTPDSTGVVKLSIFVDRSSVEVFGGQGETTLTAQIFPSSDAVHARLASTGGTTEDVRADIYKIASTWN

SEQ ID NO: 32 - protein, 418 aa, Streptomyces sp.
MSDITVTNWAGNITYTAKELLRPHSLDALRALVADSARVRVLGSGHSFNEIAEPGDGGVLLSLAGLPSVVDVDTAARTVRVGGGVRYAELARVVHARGLALPNMASLPHISVAGSVATGTHGSGVGNGSLASVVREVELVTADGSTVVIARGDERFGGAVTSLGALGVVTSLTLDLEPAYEMEQHVFTELPLAGLDPATFETVMAAAYSVSLFTDWRAPGFRQVWLKRRTDRPLDGFPYAAPAAEKMHPVPGMPAVNCTEQFGVPGPWHERLPHFRAEFTPSSGAELQSEYLMPREHALAALHAMDAIRETLAPVLQTCEIRTVAADAQWLSPAYGRDTVAAHFTWVEDTAAVLPVVRRLEEALVPFAARPHWGKVFTVPAGELRALYPRLADFGALAGALDPAGKFTNAFVRGVLAG

SEQ ID NO: 33 - protein, 417 aa, Acidothermus cellulolyticus
MSAPRLRNWAGNIAFRPRRYVQPRDLDELVEIIRVSDQVRVLGTGHSFNPIADTTGTLISLDHLPREVRVMPGRTAVSAGTRYGDLAFPLHEAGWALANVGSLPHISIAGACATATHGSGDRNGCLATAVAGMTGVDGTCRVFHLTAESPEFPGAVVHLGALGAVTEIELVTEPTFTVRQWVYEDAPLDNVFADLDDVTSAAYSVSIFTTWDPPTARQIWLKERVAAGRPDPPARRWGGRLAERDHNPVPGMPPENCTPQLGRIGPWHERLPHFRLDVTPSAGDELQSEYFVPRAAAVEAYRALRHIGSRIAPVLQISEIRTVAADELWLSPAYHRPSVAFHFTWIADEEAVRPVVSEVERALAPLQPRPHWGKLFTMDPAVVRAAYPRFDDFVALAERYDPEGKFQNDFLRRFFAG

SEQ ID NO: 34 - protein, 420 aa, Streptomyces sp.
MTPAEKNWAGNITFGAKRLCVPRSVRELRETVAASGAVRPLGTRHSFNTVADTSGDHVSLAGLPRVVDIDVPGRAVSLSAGLRFGEFAAELHARGLALANLGSLPHISVAGAVATGTHGSGVGNRSLAGAVRALSLVTADGETRTLRRTDEDFAGAVVSLGALGVVTSLELDLVPAFEVRQWVYEDLPEATLAARFDEVMSAAYSVSVFTDWRPGPVGQVWLKQRVGDEGARSVMPAEWLGARLADGPRHPVPGMPAGNCTAQQGVPGPWHERLPHFRMEFTPSNGDELQSEYFVARADAVAAYEALARLRDRIAPVLQVSELRTVAADDLWLSPAHGRDSVAFHFTWVPDAAAVAPVAGAIEEALAPFGARPHWGKVFSTAPEVLRTLYPRYADFEELVGRHDPEGTFRNAFLDRYFRR

SEQ ID NO: 35 - protein, 415 aa, Streptomyces sp.
MSTAVTNWAGNITYTAKEVHRPATAEELADVVARSAWGACAGAAGHSFNEIADPGPDGVLLRLDALPAETDVDTTARTVRVGGGVRYAELARVVHAHGLALPNMASLPHISVAGSVATGTHGSGVTNGPLAAPVREVELVTADGSQVRIAPGERRFGGAVTSLGALGVVTALTLDLEPAFEVGQHLFTELPLRGLDFETVAAAGYSVSLFTDWREPGFRQVWLKRRTDQELPDFPWARPATVALHPVPGMPAENCTQQFGVPGPWHERLPHFRAEFTPSSGAELQSEYLLPRAHALDALDAVDRIRDTVAPVLQTCEVRTVAPDEQWLGPSHGRDTVALHFTWVKDTEAVLPVVRRLEEALDAFDPRPHWGKVFTTSAAALRARYPRLADFRALARELDPSGKFTNTFLRDLLDG

SEQ ID NO: 36 - protein, 1025 aa, Kluyveromyces sp.
MSCLIPENLRNPKKVHENRLPTRAYYYDQDIFESLNGPWAFALFDAPLDAPDAKNLDWETAKKWSTISVPSHWELQEDWKYGKPIYTNVQYPIPIDIPNPPTVNPTGVYARTFELDSKSIESFEHRLRFEGVDNCYELYVNGQYVGFNKGSRNGAEFDIQKYVSEGENLVVVKVFKWSDSTYIEDQDQWWLSGIYRDVSLLKLPKKAHIEDVRVTTTFVDSQYQDAELSVKVDVQGSSYDHINFTLYEPEDGSKVYDASSLLNEENGNTTFSTKEFISFSTKKNEETAFKINVKAPEHWTAENPTLYKYQLDLIGSDGSVIQSIKHHVGFRQVELKDGNITVNGKDILFRGVNRHDHHPRFGRAVPLDFVVRDLILMKKFNINAVRNSHYPNHPKVYDLFDKLGFWVIDEADLETHGVQEPFNRHTNLEAEYPDTKNKLYDVNAHYLSDNPEYEVAYLDRASQLVLRDVNHPSIIIWSLGNEACYGRNHKAMYKLIKQLDPTRLVHYEGDLNALSADIFSFMYPTFEIMERWRKNHTDENGKFEKPLILCEYGHAMGNGPGSLKEYQELFYKEKFYQGGFIWEWANHGIEFEDVSTADGKLHKAYAYGGDFKEEVHDGVFIMDGLCNSEHNPTPGLVEYKKVIEPVHIKIAHGSVTITNKHDFITTDHLLFIDKDTGKTIDVPSLKPEESVTIPSDTTYVVAVLKDDAGVLKAGHEIAWGQAELPLKVPDFVTETAEKAAKINDGKRYVSVESSGLHFILDKLLGKIESLKVKGKEISSKFEGSSITFWRPPTNNDEPRDFKNWKKYNIDLMKQNIHGVSVEKGSNGSLAVVTVNSRISPVVFYYGFETVQKYTIFANKINLNTSMKLTGEYQPPDFPRVGYEFWLGDSYESFEWLGRGPGESYPDKKESQRFGLYDSKDVEEFVYDYPQENGNHTDTHFLNIKFEGAGKLSIFQKEKPFNFKISDEYGVDEAAHACDVKRYGRHYLRLDHAIHGVGSEACGPAVLDQYRLKAQDFNFEFDLAFE

SEQ ID NO: 37 - protein, 1025 aa, Kluyveromyces sp.
MSCLIPENLRNPKKVHENRLPTRAYYYDQYIFESLNGPWAFALFDAPLDAPDAKNLDWETAKKWSTISVPSHWELQEDWKYGKPIYTNVQYPIPIDIPNPPTVNPTGVYARTFELDSKSIESFEHRLRFEGVDNCYELYVNGQYVGFNKGSRNGAEFDIQKYVSEGENLVVVKVFKWSDSTYIEDQDQWWLSGIYRDVSLLKLPKKAHVEDVRVTTTFVDSQYQDAELSVKVDVQGSSYDHINFTLYEPEDGSKVYDASSLLNEENGNTTFSTKEFISFSTKKNEETAFKINVKAPEHWTAENPTLYKYQLDLIGSDGSVIQSIKHHVGFRQVEFKDGNITVNGKDILFRGVNRHDHHPRFGRAVPLDFVVRDLILMKKFNINAVRNSHYPNHPKVYDLFDKLGFWVIDEADLETHGVQEPFNRHTNLEAEYPDTKNKLYDVNAHYLSDNPEYEVAYLDRASQLVLRDVNHPSIIIWSLGNEACYGRNHKAMYKLIKQLDPTRLVHYEGDLNALSADIFSFMYPTFEIMERWRKNHTDENGKFEKPLILCEYGHAMGNGPGSLKEYQELFYKEKFYQGGFIWEWANHGIEFEDVSTADGKLHKAYAYGGDFKEEVHDGVFIMDGLCNSEHNPTPGLVEYKKVIEPVHIKIAHGSVTITNKHDFITTDHLLFIDKDTGKTIDVPSLKPEESVTIPSDTTYVVAVLKDDAGVLKAGHEIAWGQAELPLKVPDFVTETAEKAAKINDGKRYVSVESSGLHFILDKLLGKIESLKVKGKEISSKFEGSSITFWRPPTNNDEPRDFKNWKKYNIDLMKQNVHGVSVEKGSNGSLAVVTVNSRISPVVFYYGFETVQKYTIFANKINLNTSMKLTGEYQPPDFPRVGYEFWLGDSYESFEWFGRGPGESYPDKKESQRFGLYDSKDVEEFVYDYPQENGNHTDTHFLNIKFEGAGKLSIFQKEKPFNFKISDEYGVDEAAHACDVKRYGRHYLRLDHAIHGVGSEACGPGVLDQYRLKAQDFNFEFDLAFE

SEQ ID NO: 38 - protein, 1007 aa, Unknown
  Description of Unknown: Aspergillus niger sequence
MKLSSACAIALLAAQAAGASIKHRINGFTLTEHSDPAKRELLQKYVTWDDKSLFINGERIMIFSGEFHPFRLPVKELQLDIFQKVKALGFNCVSFYVDWALVEGKPGEYRADGIFDLEPFFDAASEAGIYLLARPGPYINAESSGGGFPGWLQRVNGTLRSSDKAYLDATDNYVSHVAATIAKYQITNGGPIILYQPENEYTSGCCGVEFPDPVYMQYVEDQARNAGVVIPLINNDASASGNNAPGTGKGAVDIYGHDSYPLGFDCANPTVWPSGDLPTNFRTLHLEQSPTTPYAIVEFQGGSYDPWGGPGFAACSELLNNEFERVFYKNDFSFQIAIMNLYMIFGGTNWGNLGYPNGYTSYDYGSAVTESRNITREKYSELKLLGNFAKVSPGYLTASPGNLTTSGYADTTDLTVTPLLGNSTGSFFVVRHSDYSSEESTSYKLRLPTSAGSVTIPQLGGTLTLNGRDSKIHVTDYNVSGTNIIYSTAEVFTWKKFADGKVLVLYGGAGEHHELAISTKSNVTVIEGSESGISSKQTSSSVVVGWDVSTTRRIIQVGDLKILLLDRNSAYNYWVPQLATDGTSPGFSTPEKVASSIIVKAGYLVRTAYLKGSGLYLTADFNATTSVEVIGVPSTAKNLFINGDKTSHTVDKNGIWSATVDYNAPDISLPSLKDLDWKYVDTLPEIQSSYDDSLWPAADLKQTKNTLRSLTTPTSLYSSDYGFHTGYLLYRGHFTATGNESTFAIDTQGGSAFGSSVWLNGTYLGSWTGLYANSDYNATYNLPQLQAGKTYVITVVIDNMGLEENWTVGEDLMKTPRGILNFLLAGRPSSAISWKLTGNLGGEDYEDKVRGPLNEGGLYAERQGFHQPEPPSQNWKSSSPLEGLSEAGIGFYSASFDLDLPKGWDVPLFLNIGNSTTPSPYRVQVYVNGYQYAKYISNIGPQTSFPVPEGILNYRGTNWLAVTLWALDSAGGKLESLELSYTTPVLTALGEVESVDQPKYKKRKGAY

SEQ ID NO: 39 - protein, 1016 aa, Unknown
  Description of Unknown: Aspergillus niger sequence
MTRITKLCVLLLSSIGLLAAAQNQTETVWPLHDDGLTTDIQWDHYSFKVHGERIFVFSGEFHYWRIPVPGLWRDILEKIKAAGFTTFAFYSSWAWHAPNNHTVDFSTGARDITPIFELAKELGMYIIVRPGPYINAEASAGGFPLWLTTGDYGTLRNNDSRYTEAWKPYFEKMTEITSRYQITNGHNTFCYQIENEYGDQWLSDPSERVPNETAIAYMELLESSARENGILVPFTANDPNMNAMAWSRDWSNAGGNVDVVGLDSYPSCWTCDVSQCTSTNGEYVAYQVVEYYDYFLDFSPTMPSFMPEFQGGSYNPWAGPEGGCGDDTGVDFVNLFYRWNIAQRVTAMSLYMLYGGTNWGAIAAPVTATSYDYSSPISEDRSISSKYYETKLLSLFTRSARDLTMTDLIGNGTQYTNNTAVKAYELRNPTTNAGFYVTLHEDSTVGTNEAFNLRVNTSAGNLIVPRLGGSIRLNGHQAKIIVTDFTFGSETLLYSTAEVLTYAVIDKKPTLVLWVPTGESGEFAVKGAKSGSVVSKCQSCPAINFHQQGGNLIVGFTQSQGMSVVQIDNDIRVVLLDRTAAYKFWAPALTEDPLVPEDEAVLIQGPYIVRSASLEKSTLAIKGDSINETAVEIFAPENVKTITWNGKQLKTSKSSYGSLKATIAAPASIQLPAFTSWKVNDSLPERLPTYDASGPAWVDANHMTTANPSKPATLPVLYADEYGFHNGVRLWRGYFNGTASGVFLNVQGGSAFGFSAYLNGHFLGSYLGNASIEQANQTFLFPNNITHPTTQNTLLVIHDDTGHDETTGALNPRGILEARLLPSDTTNNSTSPEFTHWRIAGTAGGESNLDPVRGAWNEDGLYAERVGWHLPGFDDSTWSSVTSSSSLSFTGATVKFFRTTIPLDIPRGLDVSISFVLGTPDNAPNAYRAQLFVNGYQYGRFNPYIGNQVVFPVPVGVLDYTGENTIGVAVWAQTEDGAGITVDWKVNYVADSSLDVSGLETGGLRPGWSAERLKFA

SEQ ID NO: 40 - protein, 1005 aa, Unknown
  Description of Unknown: Aspergillus oryzae sequence
MKLLSVAAVALLAAQAAGASIKHRLNGFTILEHPDPAKRDLLQDIVTWDDKSLFINGERIMLFSGEVHPFRLPVPSLWLDIFHKIRALGFNCVSFYIDWALLEGKPGDYRAEGIFALEPFFDAAKEAGIYLIARPGSYINAEVSGGGFPGWLQRVNGTLRSSDEPFLKATDNYIANAAAAVAKAQITNGGPVILYQPENEYSGGCCGVKYPDADYMQYVMDQARKADIVVPFISNDASPSGHNAPGSGTGAVDIYGHDSYPLGFDCANPSVWPEGKLPDNFRTLHLEQSPSTPYSLLEFQAGAFDPWGGPGFEKCYALVNHEFSRVFYRNDLSFGVSTFNLYMTFGGTNWGNLGHPGGYTSYDYGSPITETRNVTREKYSDIKLLANFVKASPSYLTATPRNLTTGVYTDTSDLAVTPLMGDSPGSFFVVRHTDYSSQESTSYKLKLPTSAGNLTIPQLEGTLSLNGRDSKIHVVDYNVSGTNIIYSTAEVFTWKKFDGNKVLVLYGGPKEHHELAIASKSNVTIIEGSDSGIVSTRKGSSVIIGWDVSSTRRIVQVGDLRVFLLDRNSAYNYWVPELPTEGTSPGFSTSKTTASSIIVKAGYLLRGAHLDGADLHLTADFNATTPIEVIGAPTGAKNLFVNGEKASHTVDKNGIWSSEVKYAAPEIKLPGLKDLDWKYLDTLPEIKSSYDDSAWVSADLPKTKNTHRPLDTPTSLYSSDYGFHTGYLIYRGHFVANGKESEFFIRTQGGSAFGSSVWLNETYLGSWTGADYAMDGNSTYKLSQLESGKNYVITVVIDNLGLDENWTVGEETMKNPRGILSYKLSGQDASAITWKLTGNLGGEDYQDKVRGPLNEGGLYAERQGFHQPQPPSESWESGSPLEGLSKPGIGFYTAQFDLDLPKGWDVPLYFNFGNNTQAARAQLYVNGYQYGKFTGNVGPQTSFPVPEGILNYRGTNYVALSLWALESDGAKLGSFELSYTTPVLTGYGDVESPEQPKYEQRKGAY

SEQ ID NO: 41 - protein, 1927 aa, Homo sapiens
MELSWHVVFIALLSFSCWGSDWESDRNFISTAGPLTNDLLHNLSGLLGDQSSNFVAGDKDMYVCHQPLPTFLPEYFSSLHASQITHYKVFLSWAQLLPAGSTQNPDEKTVQCYRRLLKALKTARLQPMVILHHQTLPASTLRRTEAFADLFADYATFAFHSFGDLVGIWFTFSDLEEVIKELPHQESRASQLQTLSDAHRKAYEIYHESYAFQGGKLSVVLRAEDIPELLLEPPISALAQDTVDFLSLDLSYECQNEASLRQKLSKLQTIEPKVKVFIFNLKLPDCPSTMKNPASLLFSLFEAINKDQVLTIGFDINEFLSCSSSSKKSMSCSLTGSLALQPDQQQDHETTDSSPASAYQRIWEAFANQSRAERDAFLQDTFPEGFLWGASTGAFNVEGGWAEGGRGVSIWDPRRPLNTTEGQATLEVASDSYHKVASDVALLCGLRAQVYKFSISWSRIFPMGHGSSPSLPGVAYYNKLIDRLQDAGIEPMATLFHWDLPQALQDHGGWQNESVVDAFLDYAAFCFSTFGDRVKLWVTFHEPWVMSYAGYGTGQHPPGISDPGVASFKVAHLVLKAHARTWHHYNSHHRPQQQGHVGIVLNSDWAEPLSPERPEDLRASERFLHFMLGWFAHPVFVDGDYPATLRTQIQQMNRQCSHPVAQLPEFTEAEKQLLKGSADFLGLSHYTSRLISNAPQNTCIPSYDTIGGFSQHVNHVWPQTSSSWIRVVPWGIRRLLQFVSLEYTRGKVPIYLAGNGMPIGESENLFDDSLRVDYFNQYINEVLKAIKEDSVDVRSYIARSLIDGFEGPSGYSQRFGLHHVNFSDSSKSRTPRKSAYFFTSIIEKNGFLTKGAKRLLPPNTVNLPSKVRAFTFPSEVPSKAKVVWEKFSSQPKFERDLFYHGTFRDDFLWGVSSSAYQIEGAWDADGKGPSIWDNFTHTPGSNVKDNATGDIACDSYHQLDADLNMLRALKVKAYRFSISWSRIFPTGRNSSINSHGVDYYNRLINGLVASNIFPMVTLFHWDLPQALQDIGGWENPALIDLFDSYADFCFQTFGDRVKFWMTFNEPMYLAWLGYGSGEFPPGVKDPGWAPYRIAHAVIKAHARVYHTYDEKYRQEQKGVISLSLSTHWAEPKSPGVPRDVEAADRMLQFSLGWFAHPIFRNGDYPDTMKWKVGNRSELQHLATSRLPSFTEEEKRFIRATADVFCLNTYYSRIVQHKTPRLNPPSYEDDQEMAEEEDPSWPSTAMNRAAPWGTRRLLNWIKEEYGDIPIYITENGVGLTNPNTEDTDRIFYHKTYINEALKAYRLDGIDLRGYVAWSLMDNFEWLNGYTVKFGLYHVDFNNTNRPRTARASARYYTEVITNNGMPLAREDEFLYGRFPEGFIWSAASAAYQIEGAWRADGKGLSIWDTFSHTPLRVENDAIGDVACDSYHKIAEDLVTLQNLGVSHYRFSISWSRILPDGTTRYINEAGLNYYVRLIDTLLAASIQPQVTIYHWDLPQTLQDVGGWENETIVQRFKEYADVLFQRLGDKVKFWITLNEPFVIAYQGYGYGTAAPGVSNRPGTAPYIVGHNLIKAHAEAWHLYNDVYRASQGGVISITISSDWAEPRDPSNQEDVEAARRYVQFMGGWFAHPIFKNGDYNEVMKTRIRDRSLAAGLNKSRLPEFTESEKRRINGTYDFFGFNHYTTVLAYNLNYATAISSFDADRGVASIADRSWPDSGSFWLKMTPFGFRRILNWLKEEYNDPPIYVTENGVSQREETDLNDTARIYYLRTYINEALKAVQDKVDLRGYTVWSAMDNFEWATGFSERFGLHFVNYSDPSLPRIPKASAKFYASVVRCNGFPDPATGPHACLHQPDAGPTISPVRQEEVQFLGLMLGTTEAQTALYVLFSLVLLGVCGLAFLSYKYCKRSKQGKTQRSQQELSPVSSF

SEQ ID NO: 42 - protein, 491 aa, Artificial Sequence
  Description of Artificial Sequence: Synthetic polypeptide
MDDYRPTFHFCPAENWMNEPNGLIKIDSTWHLFYQADPTANVWGNECWGHATSSDLLHWDHLPVAIPVENGIESFTGTSYYDANNTSSLGTSTNPPYLAFFTGHTSSNGTQDQRLAYSTDLGTTWLKFSGNPIISAALEAPHDVTGGLESRDPKVFFHEPSGKWVMVLAHGGQDKLTFWTSLDAKSWTWMSDLLASQIEGFPSSVTGWEVPDMFQLPIQGTNETTWVIIFTPAQGSPAGGNGVVALTGSFDGETFLANPVDSSTLWLDYGRDFDGAMSWENVPASDGRLIIAAVMNSYGSNPPTNTWKGMLSFPRTLTLKKIGSKQYFLQQPIAELSTVDNALASIQNQTIAPKQTLLSSIHGSSLDVRIAFSVDSGATLSLAVRKGGSEQTVIRYSQSNSTLSVDRTASGDISYDPAAGGIHSAQLARDNTELVYLRVLVDTCSVEVFGGQGEAVISDLIFPSNSSDGLSLEVIGGTAMLQSVEVFSVSL

SEQ ID NO: 43 - protein, 460 aa, Unknown
  Description of Unknown: Aspergillus oryzae sequence
MVMPVLAGCEGAAIPANLVSQTQSYNSNLIENSLSCEQQVTSSRHVLYSRPLFHLTAPRGWLNDPCGLGYDPATGLYHLSFQWNPKGNDWGNISWGHSVSQDLISWKTSPEPCLTPSAEYDSCGIFTGCFRPSDINGVAGALTYIYTSVRRLPLHYTLPYEVGSESLSIAVSRDNGVTWQRLDSNPILPAPPPDLNVTAWRDPYIGVWTAKQGEHDNDILPPLSLSGFLSGGIAGRTPTVFVYSVNPDDLRKWTYVGPLVNVGLNFRPSRWSGDLGVNWETTNWVVLTDHEGTTKNFIIMGVEGCLVSEREQKRVSRSQLWMAVDPRPEQPMSEPIDALTDYAFSGIFDHGCAYAANSFWDPVTSQYIVYCWITEEDLPDGIRHRQGWSGVISLPRSLKLTTLRNVTKTRHSNLSDVTSIEKEANGEGSFTIRTLGVEPDQRLKKLRGEAQSFTNVALRP

SEQ ID NO: 44 - protein, 495 aa, Unknown
  Description of Unknown: Aspergillus oryzae sequence
ARAASYSGDLRPQTHFSPPSNFMNDPNGLFYDSKRGVYHLYYQYNPTATVAGNQHWGHATSPDLYHWTNQPIALAGDKPEEYIFSGSAVVDSNNTSGFFPDQDDGVIAIYTVDTPTLETQHIAYSRDGGYTFTKYENNPVIDIGSKQFRDPQVVWHPETQQWVMTIAYAQDLVIGFYTSPNLKDWTHASNFTQEGLPGDQFECPNLVKFSVDRAVSEETSKFVLFISVNPGAPLGGSGTFYVVGDFNGTHFTSEVAQETLFDFSKDNYAAQWYSGIPENEPPVSIGWASNWDYTEEVPTGPLEGWRNAMTLPRAHTLTKVNGVWTVTHSPFEGLSALKGRQLVSKSVHSGDVKANFSGVPSNAVYFDVTLKGIDVAKPTGRVNFNFTSSVSGEFLDGGVSLDDSSFWISRAGTHLFTIEDNGNYTSSSTTTISSFGNGTFSFSGVIDRSVFEVFLGQDGIQSGTMTFFPSSPLDTLAVSAEDLGDRASVSVKAWG

SEQ ID NO: 45 - protein, 628 aa, Unknown
  Description of Unknown: Aspergillus niger sequence
MKLQTASVLLGSAAAASPSMQTRASVVIDYNVAPPNLSTLPNGSLFETWRPRAHVLPPNGQIGDPCLHYTDPATGLFHVGFLHDGSGISSATTDDLATYQDLNQGNQVIVPGGINDPVAVFDGSVIPNGINGLPTLLYTSVSFLPIHWSIPYTRGSETQSLAVSSDGGSNFTKLDQGPVIPGPPFAYNVTAFRDPYVFQNPTLDSLLHSKNNTWYTVISGGLHEKGPAQFLYRQYDSDFQYWEYLGQWWHEPTNSTWGNGTWAGRWAFNFETGNVFSLDEYGYNPHGQIFTTIGTEGSDLPVVPQLTSIHDMLWVSGTVSRNGSVSFTPNMAGFLDWGFSSYAAAGKVLPSTSLPSTKSGAPDRFISYVWLSGDLFEQAEGFPTNQQNWTGTLLLPRELRVLYIPNVVDNALARESGASWQVVSSDSSAGTVELQTLGISIARETKAALLSGTSFTESDRTLNSSGVVPFKRSPSEKFFVLSAQLSFPASARGSGLKSGFQILSSEHESTTVYYQFSNESIIVDRSNTSAAARTTDGIDSSAEAGKLRLFDVLNDGEQAIETLDLTLVVDNSVLEVYANGRFALSTWVRSWYANSTNISFFHNGVGGVAFSNVTVSEGLYDAWPDRQS

SEQ ID NO: 46 - protein, 485 aa, Paenibacillus polymyxa
MNVIRQEKYRPSYHFSPKSGWMNDPNGMVYYEGRYHLFYQHHPFGTTWGPMHWGHAVSTDLMNWEEQPIALEPDELGTIFSGSAVVDEQDTSGFFGGKPGLVAIFTHHASLPGTEQVRQCQSLAYSTDSGKTWIKYTGNPVLEDKECIDFRDPKVFWHKPTEQWVMVLACGQTIRIYHSPNLKEWTFASEFGHGIGSHDAVWECPDLFPLYIDEKREQVKWVMLVSIGDVPEIREGSRTQYFTGEFDGTTFVADAESEKVRWLDYGRDNYAGVCWSDIPAEDGRRLFMGWMSNWRYANQTPTERWRGAMSIPRELALETRKGTVALVQRPVRELEGLRTPVLSLTEPSWEEVRNALSALQLDCYELVAEFATTGDFGFKVRVSDEQETLVGYTSATQEVYVDRKRSGRSDFHEDFAGKHGASLTILPDRMDIRIYVDRSSIEVFFDRGQVAITDLIFPDAEAKGLEIFSAEEQITVFSLELYALK

SEQ ID NO: 47 - protein, 535 aa, Unknown
  Description of Unknown: Penicillium citrinum sequence
MVHIIKTLAVGLLACVAHAFNYDQLYPGQYHFSPQDNWMNDPNGLLYHNEIYHLFYQYNPSGIQWGNLSWGHATSKDLTHWEEQPVALLARGHSGNVTEMYFTGSAVVDMNNTSGFRKDRKTPIVAMYTSFILAQTLPSGKTIQENQQAQSIAYSLDDGMTWTTYDNSNPVIHNPPAPYQDQFKEFRDPFVFWHKESEQWVAVAALAVLHKFVIYTSDNLTDWSSVLTFGPYAQGGVWECPGLVKLPLDGGNSTKWVITSGLNPGGPPGTVGSGTQYFVGDFDGTTFTPDADTVYPGNSTANWMDWGPDFYAAAGYNGLSLNDHVHIGWMNNWQYGANIPTYPWRSAMAIPRHMALKTIGNKATLVQQPQEAWSSISNKRPICSRTFKTLSEGSTNTTTTGETFKVDLSFSAKSKASTFAVALRASANFTEQTLVGYDFAKQQIFLDRTHSGDVSFDNTFASVYRGPLAADVNGKVNLSIFVDRSSVEVFGGQGETTLTAQIFPSRDAINTQLVSTGGTTKSVKIDIFNVASTWV

SEQ ID NO: 48 - protein, 493 aa, Geobacillus stearothermophilus
MKTHNSEKYRPTFHFSPKKNWMNDPNGLVYFKGEYHLFFQHNPNDSIWGPMHWGHAVSKDMIEWEELDIALYPDENGTIFSGSVVIDWNNTSGFFPKEPGMVAIFTQNLHDADHTTPIQTQSLAFSHDRGRTWTKYEKNPVLKHPTKVDFRDPKVFWHYESEKWIMVLATGQTVSIYSSPNLIDWQFESEFGENIGCHDGVWECPDLFELPVENSEEKKWVMFVSIGDNRQFDSGSRTQYFIGSFDGSNFKVDENNNEVLWLDFGKDNYAGVTFSDIPKEDGRRIYIGWMSNWRYANEVPTVGWRGQMTLPRVLSLRKIGDKLRVIQNPVKELDNYFTKQIVIHDEIISSGIQKKIDINQPSVEIVLNVNNLGAKQFGLVLHHTENQSTTITIDLLTNLLSLDRTNSGEVSFSENFLNNQVMKIHDTTKLNLRIIVDSSSVEIFVNEGAHALTSLIYPDKACEKISIFSLGGDIQLSNSYISFPNSIRRNFGY

SEQ ID NO: 49 - protein, 516 aa, Bacillus sp.
MNYKKTGKWLTVFLTFAGILLFIDLLPNEEPVKKTKSNHKADYRAAYHFTTPDKWKNDPQKPIYFDGQYHYFYLYNRDYPKGNGTEWRHAVSEDLVHWTDEGVAIPKYTNPDGDIWTGSVVIDKENTAGFGKNVLVAIVTQPSAKDKKQEQHLWYSTDKGKSFKPYSDNPIMPNPGTDDFRDPKVIWDDQDNKWVMVMAEGTKIGFYESDNLKDWRYTSGFFAEQAGIVECPDLYMMRASDGTTKWVLGVSANGKPWGKPNTYAYWTGSFDGKEFTVDQTEAQWLDYGFDWYGGVTFEDGKSTDPLEKRYALAWMNNWDYANNTPTLKNGFNGTDSVIRELWLQEQDGTYSLVSQPAEALDQLTVSTDKVEDQDVNGSKTLSITGDTYQLDMDLSWSELKNAGVRLRESEDQKRHIDVGIFAEGGYAYVNRAATNQPDKSKTYVESQAPYDVSKQNAHLKILVDKTTIEVFVGDGKTVFSNEVFPKPEDKGITLYSEGGTASFKNITVKHLDTVHE

SEQ ID NO: 50 - protein, 538 aa, Gluconacetobacter johannae
MWNPFQALIRSPRRPSGIVRRRTGPLAFALLMLASPALRAQDTPHWRPALHFSPARHWANDPNGPFLLNGVYHLFFQYNPDGMVWGHTSWGHATSTDLVHWNEESVAIPARPGEDIFSGTVVLDRDNRSGLGSKATPPLLAFYTSVYYNNPAHPDGTQAQSIAYSVDGGHTWRAHAGNPILTLQPDSRQFRDPSVFWYPDGRCWVMATVVGDAQVVKLYRSTDLLHWSFLSDFQPSGYRKPGMLWEMPLLLPLPLDGNPHAMKWVMIVSVNPWSIAGGSGVQYFVGRFDGTTFTPDALPAPGSDPSRYLWLDHGADQYAMARFANTGDGNPLLIGWMSNWDYASDVPTSPWRGQMTLPVEVALKTVEGRPALVQAPPRLYDDMVRKSGVRSYPDRILKAGERLPQPFGGDVLDIHLTIRRGDARRAGIVVRGSADGTIGTSIGYDFVDQMLTLDRGHSGNVGFSPRFSLAHIAHLAAPDGTLSLHLVIDRNSVELFANDGVLRMTDLVFPPAGSDRVSLFAEGGSATFGAMRVAVPGK

SEQ ID NO: 51 - protein, 450 aa, Granulicella sp.
MDKRDFLKGSATTAVALMMGLNESKAFADDSVPRTNWSGNYHYSTNKVLQPASVAETQDAVRSVAGVRALGTRHSFNGIADSQIAQISTLKLKDVSLDAKSSTVTVGAGIRYGDLAVQLDAKGFALHNLASLPHISVGGACATATHGSGMGNGNLATAVKAVEFVAADGSVHTLSRDRDGDRFAGSVVGLGALGVVTHLTLQVQPRFEMTQVVYRDLPFSELEHHLPEIMGAGYSVSLFTDWQNGRAGEVWIKRRVDQGGASAPPARFFNATLATTKLHPILDHPAEACTDQLNTVGPWYERLPHFKLNFTPSSGQELQTEFFVPFDRGYDAIRAVETLRDVITPHLYITELRAVAADDLWMSMAYQRPSLAIHFTWKPETDAVLKLLPQIEAKLAPFGARPHWAKVFTMKSSHVAPLYPRLKDFLVLAKSFDPKGKFQNAFLQDHVDIA

SEQ ID NO: 52 - protein, 417 aa, Streptomyces sp.
MTETVTNWAGNITYTAKELHRPRSLDALRSLVADGARVRVLGSGHSFNVIADPGPDGVLLSLDALPPAVDVDTAARTVRVSGGVRYAELARAVHAHGLALPNMASLPHISVAGSVATGTHGSGVGNGPLAAPVRAVELVTGDGTTVTVERGEERFGGAVTALGALGVVTALTLDLEPAYEVEQHVFTELPLTGLDPAAFETVMSAAYSVSLFTDWREPGFRQVWLKRRSDQPLPDFPFAAPATEKMHPVPGMPAVNCTEQFGVPGPWHERLPHFRAEFTPSSGAELQSEYLLPRRYAVDMLTALDGIRDTVAPVLQTCEIRAVAADGQWLSPAYGRDTVAAHFTWIEDTAAVLPVVRRLEAALDGFEARPHWGKVFTTPAHALRERYPRLGDFRALAAELDPAGKFANAFVRDVLGG

SEQ ID NO: 53 - protein, 417 aa, Streptomyces viridodiastaticus
MTESVTNWAGNITYAAKELHRPRTTDALRALVADSARVRVLGSGHSFNDIADAGEDGVLLSLAALPPVIEVDAESRTVRVGGGVRYAELAREVHRHGLALANMASLPHISVAGSVATGTHGSGVGNGPLSSSVRAVELVTADGSTLTLERGDERFGGAVTALGALGVVTALTLDLEPAYEVEQRVFTELPLDVLDAGTFDAVMSAAYSVSLFTDWREPGFRQVWVKHRTDRPRTGFPWAAPATQKMHPVPGMPGVNCTEQFGAPGPWHERLPHFRAEFTPSSGAELQSEYLLPRETAVDALRALDAVRETVAPVLQTCEVRTVAAEEQWLGPAYGRDTVALHFTWIEDTATVLPVVRRVEEALAPFAPRPHWGKVFAIPPAELRSRYPRLHDFRALVRELDPEGVFGNAFVRSVLGG

SEQ ID NO: 54 - protein, 418 aa, Streptomyces diastaticus
MSDVTVTNWAGNITYAAKELLRPHSPQALRALVADSARVRVLGSGHSFNEIAEPGAEGVLLSLADLPAEVDVDTAARTVRVGGGVRYAELARAVHARGLALANMASLPHISVAGSVATGTHGSGVGNGPLASAVREVELVTADGSTVALGRDDERFGGAVTSLGALGVVTSLTLDVEPAYEVEQHVFAELPLAGLDTATFGTVMAAAYSVSLFTDWRAPGFRQVWLKRRTDQPLPDFPYAAPAAEKMHPVPGMPAVNCTEQFGVPGPWHERLPHFRAEFTPSSGAELQSEYLMPREHALAALHAMDAIRDVLAPVLQTCEIRTVAADGQWLSPSYGRDTVAAHFTWVEDTAAVLPVVRHLEGALAPFAARPHWGKVFTIPAGELRALYPRLADFRALAGALDPAGKFTNAFVRGVLAG

SEQ ID NO: 55 - protein, 478 aa, Streptomyces coelescens
MKTASRGTCGNRSIRSSTSAVRLSIPCLLPGPAFDFSRYAPAGEASRAGALQTRRVGFRAMSDITVTNWAGNITYTAKELLRPHSLDALRALVADSARVRVLGSGHSFNEIAEPGDGGVLLSLAGLPSVVDVDTAARTVRVGGGVRYAELARVVHARGLALPNMASLPHISVAGSVATGTHGSGVGNGSLASVVREVELVTADGSTVVIARGDERFGGAVTSLGALGVVTSLTLDLEPAYEMEQHVFTELPLAGLDPATFETVMAAAYSVSLFTDWRAPGFRQVWLKRRTDRPLDGFPYAAPAAEKMHPVPGMPAVNCTEQFGVPGPWHERLPHFRAEFTPSSGAELQSEYLMPREHALAALHAMDAIRETLAPVLQTCEIRTVAADAQWLSPAYGRDTVAAHFTWVEDTAAVLPVVRRLEEALAPFAARPHWGKVFTVPAGELRALYPRLADFGALAGALDPAGKFTNAFVRGVLAG

SEQ ID NO: 56 - protein, 418 aa, Streptomyces sp.
MTGTVTNWAGNITYAAKELHRPHTLDTLRALVAGSSRVRALGSGHSFNGIAEPGGAGALLSLEGLPAQVDVDTAARTVRVGGGVRYSELARRVHGRGLALPNMASLPHISVAGSVATGTHGSGVGNGPLSSVVREVELVTADGSTVRIGRGDEARFGGAVTSLGALGVVTALTLDLEPAFDVEQHLFTGLPLAGLDSHLFETVMSAAYSVSLFTDWRAPGFRQVWVKRRTDQPLPDFPWAPPATEKLHPVPGMPAVNCTDQFGVPGPWHERLPHFRAEFTPSSGEELQSEYLLPRRFAVDMLHTIDGIRETVSPVLQTCEVRTVAADGQWLSPSYGRDTVAAHFTWVADTPAVLPVVRRLEEALAPFDARPHWGKVFTTPASELPALYPRLGDFRTLARSLDPAGKFSNAFVRDVLGG

SEQ ID NO: 57 - protein, 417 aa, Streptomyces viridosporus
MTETLTNWAGNITYTAEELHRPRTLDALRALVAESSRARVLGSGHSFNEIAEAGEGGVLLSLDALPPQIDVDTATRTVRVGGGVRYAELARRVHAHGLALPNMASLPHISVAGSVATGTHGSGVTNGSLASVVREVEMVTATGDTERTSRDDARFGGVVTALGALGVVTALTLELEPAYEVEQHVFTELPLDVLDAGTFQAVMAAAYSVSLFTDWRAPGFRQVWLKRRTDQPLRPFPWAAPATEKMHPVPGMPAVNCTEQFGVPGPWHERLPHFRAEFTPSSGAELQSEYLLPRRFAVDVLHALDGMRETVAPVLQTCEVRTVAADDQWLSPSHGRDTVAVHFTWIEDTRAVLPVVRRVEEALAPFGARPHWGKVFTTPAAELRARYPRLDDFRALARSLDPAGTFANAFVRDLLGD

SEQ ID NO: 58 - protein, 417 aa, Streptomyces sp.
MTETITNWAGNITYTAKELHRPYSVGAIGSLVAGSARVRVLGSGHSFNEIAEPGPDGVLLSIADLPPVIDVDRTARTVRVSGGVRYAELARTVYAHGLALPNMASLPHISVAGSVATGTHGSGIGNGSLATSVREVELVTADGSVVTVGREDRRFGGAVTSLGALGVVTALTLDLEPSFDVEQHLFTELPLDGLDMAAFETVMSSAYSVSMFTDWGAPGFRQVWLKRRTDQPLPDFPWAAPATEKLHPVPGMPAVNCTEQFGVPGPWHERLPHFRADFTPSSGAEIQSEYLLPREHALAALHAIDAIRATIAPVLQTCEVRLVAADEQWLSPAYGRDTVALHFTWVEDTAAVLPVVRRLEEALAGFEPRPHWGKVFALPAEAVGARYPRLADFRALARELDPEGKFANAFVRDILGA

SEQ ID NO: 59 - protein, 417 aa, Streptomyces sp.
MTGTITNWAGNITYGAGELHRPVSLDEVAALVAASPRVRVLGSGHSFNEIAEPGPEGVLLSIAALPPLVDVDGAARTVRVAGGIRYAELAREVHAHGLALPNMASLPHISVAGSVATGTHGSGVGNGSLASAVREVELVTADGSVVRIGRDDPRFGGAVTSLGALGVVTALTLDLEPAFEVEQHVFTELPLEGLDAAAFEAVMSAAYSVSLFTDWRTPGFRQVWLKRRTDQPLAGVPGAAPATEKMHPVPGMPAENCTEQFGVPGPWHERLPHFRAEFTPSSGAELQSEYLLPRERALEALHAVDAIRDTVAPVLQTCEVRTVAADGQWLSPSYGRDTVALHFTWIEDTATVLPVVRRLEAALEAFGPRPHWGKVFTTPARELRDRYPRLDDFRALARDLDPKGTFANGFVRDVLGD

SEQ ID NO: 60 - protein, 417 aa, Streptomyces lincolnensis
MTETVTNWAGNITYAAKELHRPHSLDALRDLVAGSATVRVLGSGHSFNEIAEPGPEGVLLSLAALPVEVDVDTGARTVRVGGGVRYAELARRVHGHGLALSNMASLPHISVAGSVATGTHGSGVGNGSLASAVREVEIVTADGSTLVLGRGDERFGGAVTSLGALGVVTALTLDLLPGYEVEQHVFTGLPLDGLDFQTLETVLASAYSVSLFTDWRAPGFGQVWLKRRTDQPLPDVRWATPATEKMHPVPGMPAVNCTEQFGVPGPWHERLPHFRAEFTPSSGAELQSEYLLPRPHALDALRALDAIRTTIAPVLQTCEVRTVAPDEQWLSPAYGRDTVALHFTWVADTAAVLPVVGRLEAALDAFDARPHWGKVFTVPAAVLRGRYPRLDDFGALMRALDPEGKFANGFVRDALGV

SEQ ID NO: 61 - protein, 418 aa, Streptomyces sp.
MHETVTNWAGNITYAAKELHRPGSLAALRALVGGSDRVRVLGSGHSFNEIAAPGPEGVLLSLADLPPEIDVDTAARTVRVGGGVRYAELARRVHGQGLALHNMASLPHISVAGSVATGTHGSGVLNGPLSVSVREMELVTADGSAVTTGRDEERFGGAVTSLGALGVVTALILDLEPAFEVEQHVFTELPLEGLDSGAFETVMATGYSVSLFTDWREPGFRQVWLKRRTDQPLPAFPWAAPATEKMHPVPGMPAVNCTEQFGVPGPWHQRLPHFRAEFVPSSGAELQSEYLLPRGHAVRMLHALDAIRETVAPVLQTCEVRTVAGDDQWLSPSYGRDTVAVHFTWVEDAQAVLPVVRLVEEALEPFEARPHWGKVFTVPAPVLRGLYPRLDDFRRLTRELDPEGKFANAFVREVLAPA

SEQ ID NO: 62 - protein, 417 aa, Streptomyces sp.
MTDTVTNWAGNITYRAKELQRPHSLDALRALVGASAKVRVLGSGHSFNEIAEPGPQGVLVSIADLPPVTDVDTAARTVRVSGGVRYAELARAVHSRGLALPNMASLPHISVAGSVATGTHGSGVLNGSLASAVREVELIVADGSTERIARGDDRFEGAVTSLGALGVVTALTLDLEPAYEVEQHLFTELPLDGLDFGTFKTIMASAYSVSLFTDWRAPGFRQVWRKRRTDRPLPDFPWAAPATEKLHPVPGMPAVNCTEQFGVPGPWHERLPHFRAEFVPSSGAELQSEYLLPRPHALDALHALDAISATLAPVLQTCEVRTVAADTQWLSPAYGRDTVALHFTWIEDTRAVLPVVRQLEEALDPFEARPHWGKVFTTPATVLRERYPRLDDFRALTRTLDPAGRFTNAFLRDVLEG

SEQ ID NO: 63 - protein, 414 aa, Streptomyces sp.
MTETVTNWAGNITFAAKELHRPHSLDALRSLVAAAGRVRVLGSGHSFNRIAEPGGEGVLLSLGALTGEVEVDTAARTVRVGGGVRYAELARRVHEHGLALANMASLPHISVAGSVATGTHGSGVGNGSLASSVREVEIVTADGSTVVLERGDERFGGAVTSLGALGVVTALVLDLEPAFRVEQHLFTELPLEGLDFDTVAGAAYSVSLFTDWDAPGFRQVWLKRRTDAPLADFPWAAPAVQALHPVPGMPAINCTEQLGVPGPWHERLPHFRAEFTPSSGNELQSEYLLPRRHAVAALRALDGIRQTVSPVLQICEVRTVAADEQWLSPSYGRDTVAVHFTWIEDTASVLPAVRAVEAALEPFGPRPHWGKVFETPAATVRGRYPRMDDFTALARALDPAGKFANDFVRDVLGN

SEQ ID NO: 64 - protein, 414 aa, Streptomyces sp.
MTGTVTNWAGNITYAAKELHRPPTLDALRSLVADSARVRVLGSGHSFNEIAEPGPEGMLLSLDALPPEIDVDTTARTVRVSGGVRYAELARHVHAHGLALANMASLPHISVAGSVATGTHGSGVGNPPLAAAVREVELVTGDGTTVTITRGDERFGGAVTSLGALGVVTALTLDVQPSYDVEQYVFTELPLAGLDFETVMAAAYSVSLFTDWREPGFRQVWVKRRTDQPMPAFPWAAPATQALHPVPGMPAANCTEQFGVPGPWHERLPHFRAEFTPSSGAELQSEYLMPRSYAVDVLHALDAIRTVMAPVVQTCEVRTIAADQQWLSPAYGRDSVAVHFTWIEDAQAVLPVVRRVEEALDGLDARPHWGKVFATPGAMVRERYPRLGDFRALARTLDPSGTFTNAFVRDILAA

SEQ ID NO: 65 - protein, 414 aa, Streptomyces sp.
MTETVTNWAGNITYAAKELHRPRTLDALRTLVAESARVRVLGSGHSFNEIAEPGPDGTLLTIAALPPEFDVDTTARTVRVSGGVRYAELARRVDGHGLALPNMASLPHISVAGSVATGTHGSGVGNGSLAAAVREVEIVTADGSTVTIGRGDDRFDGAVTSLGALGVVTSLTLDLEPAFEVEQHVFTELPLAGLDFETVAASAYSVSLFTDWREPGFRQVWLKRRTDQPPVDFPWAAPATEAMHPVPGMPAVNTTEQLGVPGPWHERLPHFRAEFTPSSGSELQSEYLLPRSAAVDALHAVDGVRETVSGVLQVCEVRTVAADAQWLSPSYGRDTVALHFTWIEDTERVLPVVRRLEEALDPFDARPHWGKVFTVPAEVVRGRYPRLGDFRTLAQGLDPEGKFANAFVRDVLGD

SEQ ID NO: 66 - protein, 414 aa, Streptomyces sp.
MTETVTNWAGNVTYTAKELHRPHTRDALRSLVADSARVRVLGSGHSFNDIADAGDGGVLLSLDALPAEADVDTGARTVRVGGGVRYAELARRVHAHGLALPNMASLPHISVAGSVATGTHGSGVGNGPLASVVREVELVTADGSTVTIRRGDPRFGGAVTSLGTLGVVTALTLDLEPAFEVEQHVFTELPLEGLDFETVAATAYSVSLFTDWRAPGFGQVWLKRRTDQPLPGFPWASPATEKMHPVPGMPAANCTEQFGVPGPWHERLPHFRAEFTPSSGAELQSEYLLPRPYALDALHAVAAIGTAVAPVLQICEVRTVAADEQWLSPSYGRDTVALHFTWIEDTERVLPAVRRLEEALEPYEARPHWGKVFTVPAPALRARYPRLDDFRALARELDPQRKFANAFVQAVLVD

SEQ ID NO: 67 - protein, 416 aa, Streptomyces olivochromogenes
MTETLTNWAGNITYTTKELHRPHTHDALAALVAESARVRVLGSGHSFNTIAEPGDDGVLLSLTALPPTVDVDSTARAVRVAGGVRYAELARRVHEHGFALHNMASLPHISVAGSVATGTHGSGVTNGSLASAVREVEIVTADGSTVTIGRDDTRFDGAVTSLGALGVVTALTLDLEPDFEVSQHVFTELPLAGLDFETVAATAYSVSLFTDWGRPGFRQVWLKRRTDQPLPDFPWAAPATEAMHPVPGMPAENCTQQFGVPGPWHERLPHFRAEFTPSSGAELQSEYLLPRPHALAALHAVDAIREHIAPLLQICEVRTVAADRQWLSPAYGRDTVALHFTWVEDTAAVLPVVRRVEEALEPFDPRPHWGKVFTTPGEVLRGRYPRLDDFRALAETMDPAGKFTNTFVRDFVHPLS

SEQ ID NO: 68 - protein, 414 aa, Streptomyces mexicanus
MSAAVTNWAGNITYTAKEVHRPATVGALAELVARSAKVRVLGSGHSFNEIADPGPDGVLLRLDALPAEVDVDTAARTVRVGGGVRYAELARRVHAHGLALPNMASLPHISVAGSVATGTHGSGVANGPLAAPVREVELVTADGSTVRIARGDARFDGAVTSLGALGVVTALTLDLEPTFEVEQHLFTELPLAGLDFETVAAAAYSVSLFTDWRDPGFRQVWLKRRTDQPLPEFPWAVPAKVALHPVPGMPAENCTQQFGVPGPWHERLPHFRAEFTPSSGAELQSEYLLPRGHALDALHAVERIRETVAPVLQTCEVRTVAPDAQWLGPSHGRDTVALHFTWVEDTRAVLPVVRRLEEALDAFDPRPHWGKVFTTPAAVLRARYPRLDDFRALARELDPSGKFTNAFLRDLLDG

SEQ ID NO: 69 - protein, 414 aa, Streptomyces sp.
MAELVSNWAGNVTYAAKEVHRPRSADALRSAVAGNARVRALGSGHSFNEIAEPGGEGVLVSLDALPAEIDVDTAARTVRVGGGVRYAELARQVELHGLALPNMASLPHISVAGSVATGTHGSGVGNGPLSAPVREVEIVTADGSTLVLGRGDDRFGGAVTSLGALGVVSALTLDLEPSFAVEQQVFTELPLVGLDFESVMASAYSVSLFTDWRAPGFRQVWLKRRTDRPAADRPPATPATEALHPVPGMPAVNCTQQLGVPGPWHERLPHFRAEFTPSSGAELQSEYLIERSRALEALHAIDAVRAAVAPVLQICEVRTVAADEQWLSPSYGRDTAALHFTWIEDTDAVLPVVRRVEEALDAFDPRPHWGKVFTVPSERLRGRYPRLDDFRALVRELDPTGKFTNAFVRDLLGG

SEQ ID NO: 70 - protein, 424 aa, Streptomyces fumanus
MTDTAVTNWAGNITYTAKEVHRPHSLEALRALVAGSARVRVLGSGHSFNEIAEPGAEGVLLSLAGLPGEVDVDTAAGTVRVGGGVRYAELARVVHAHGLALPNMASLPHISVAGSVATGTHGSGVTNGSLASVVREVELVTADGTTVTLARGDRRFDGAVTSLGALGVVTALTLDLEPAYEVEQHVFTELPFAALDAGTLAAVLSAAYSVSLFTDWRSPGFRQVWLKRRTDQLLPDFPYAAPAAEKMHPVPGMPAVNCTEQFGVPGPWHERLPHFRAEFTPSSGDELQSEYLLPREHALDALRALEAIREEVAPVLQTCEVRTVAADAQWLSPAYGRDTVALHFTWIADTAAVLPVVRRVEEALDAFDARPHWGKVFTTAPAVLAARYPRLGDFAALVRELDPAGVFTNAFVRQVLSGPAGGSV

SEQ ID NO: 71 - protein, 416 aa, Streptomyces sp.
MTDKVTNWAGNITYATKELHRPHSLDALRALVAGSGRVRVLGSGHSFNEIAEPGADGVLLSLAGLPTEIEVDSVARTVRVGGGVRYAELARVVHEHGLALPNMASLPHISVAGSVATGTHGSGVANGSLAAPVREVELVTADGETVRIGREDARFGGAVTSLGALGVVTTLTLDLELAFEVEQHVFTELPLERLEFETVARAAYSVSLFTDWAAPGFRQVWLKRRTDQPLADFPWASPATEKLHPVPGMPAVNCTEQFGVPGPWHERLPHFRAEFTPSSGAELQSEYLLPRPYAMDALRALDAIRTVVAPVLQTCEVRTVAADEQWMSPSYGRETVALHFTWVEDAAAVLPVVRRVEEALEGMDARPHWGKVFTMPGEVLRARYPRLGDFRELVGALDPAGKFTNTFVRDFLHPLS

SEQ ID NO: 72 - protein, 419 aa, Streptomyces sp.
MTATAPVTNWAGNITYAAKELHRPRSLDALRALVAGSGRVRVLGSGHSFNEIAEPGPDGVLLSLAELPPAIDVDTSARTVRVAGGVRYAELARVVHRHGLALPNMASLPHISVAGSVATGTHGSGIGNGPLSVAVREVELVTADGETVRIGRGEERFGGAVTSLGALGVVTALTLELEPAFEVEQYVFTELPLAGLDSDGLEAVMGAAYSVSLFTDWGAPGFRQVWVKRRADQPYAGFDRAAPATEAMHPVPGMPAVNCTEQFGVPGPWHERLPHFRAEFTPSSGDELQSEYLLPRGSAVDALYAIDRIRDTVAPVLQTCEIRTVAADDQWLSPAYGRDSVALHFTWIADPAAVLPAVLRVEQALDGFGARPHWGKVFAVPAGVVRERYPRLGDFAALARELDPEGKFTNAFVRNVLEG

SEQ ID NO: 73 - protein, 486 aa, Streptomyces flaveus
MGRTKAWQESGGPDTSAVRLKVTRSHMFTRSVASRLCAGNTAALPAEGTQPPVKVASTYNRGLPGEGRRMAGMTEPVTNWAGNITYSAKELHRPHSLDALRALVAQSARVRVLGSGHSFNEIADPGSEGVLVSLTALPPSVEVDTAARTVRVAGGVRYAELARRVHEHGLALHNMASLPHISVAGSVATGTHGSGNGNGSLASAVREVELVTADGSLLTITRGDARFDGAVTSLGALGVVTALTLDLEPDFEVAQQVYGQLPFAGLDFETVSAAAYSVSLFTDWQRSGFVQAWVKRRTDQPLHDFPWAAPATEAMHPVPGMPAENCTQQFGVPGPWHERLPHFRAEFTPSSGAELQSEYLLARPYALDALHALDAIRETIAPVLQICEVRTVAADSQWLSPAYGRDTVAFHFTWVEDTAAVLPVVRRVEEALAPFDPRPHWGKVFTTPPAALRERYPRIDAFTALAGELDPTGTFRNTFVREVLGV

SEQ ID NO: 74 - protein, 440 aa, Streptomyces sp.
MSNTTGTNGSGTGASGATPSSVVRTGVNWTGTNWAGNITFAARELHRPATPEALRALVAGAARVRVLGSGHSFNLIAEPGADGVLLSLDALPAEIDVDTTARTVRVGGGVRYAELARRVHRHGLALPNMASLPHISVAGSVATGTHGSGVRNGSLAAPVREVEILTADGSTVTVGRDDRRFGGAVTSLGALGVVTALTLDLSPAFEVEQHLFTELPLEGLDFETVAAAAYSVSLFTDWRAPGFRQVWLKRRTDEPLAAFPWATPATEALHPVPGMPAVHCTEQFGVPGPWHERLPHFRAEFTPSSGQELQSEYLMPREHALGALRALDGIRGTVAPVLQTCEVRTVAADEQWLSPAYGRDSVAVHFTWVEDTAAVLPAVRAVEAALEPFAPRPHWGKVFETPAAALRERYPRLDDFTALVRELDPAGTFTNTFVRGVLES

SEQ ID NO: 75 - protein, 416 aa, Streptomyces sp.
MTESVTNWAGNITYAGAELRRPRTLEELRALVRGGGRVRVLGSGHSFNRIADPGEGGLLLSLDAMPPRIDVDTAARTVAVGGGVRYAELARAVHAHGLALGNMASLPHISVAGSVATGTHGSGVTNGPLASAVREVELVTAAGDLERIGRADDRFGAVVTSLGALGVVTALTLDLEPAYEVEQHVFTELPLDVLDPQTFEQVMASAYSVSLFTDWRAPGFRQVWLKRRTDRPLPPFPWAEPATGKMHPVPGMPAVNCTEQFGVPGPWHERLPHFRAEFTPSSGAELQSEYLMPRGSAVEALHALDAVREAVAPVLQTCEIRTVAADGQWLSPAHGRDSVAFHFTWIADAGAVLPVVRRVEEALAPFSPRPHWGKVFTTPVAGLRGRYPRLGDFARLAGALDPAEVFRNAFVRELLR

SEQ ID NO: 76 - protein, 417 aa, Streptomyces sp.
MTDTVTNWAGNITYSAKEVHRPHSLGALRALVAESARLRVLGSGHSFNEIAEPGAGGVLLSLAGLPPETDVDTAARTVRVGGGVRYAELARTVHAHGLALANMASLPHISVAGSVATGTHGSGVGNGGLASSVREVELVTADGSVLTVRRGEERFDGAVTSLGALGVVTALTLDLEPAYGVEQHVFTEVPLAGMDAAEVEAVLSAAYSVSLFTDWSRPGFRQVWFKRRTDQPLPRFRWGTPATETMHPVPGMPGVNCTRQFGEAGPWHERLPHFRADFVPSSGAELQSEYLMPRAHAVEALHALDAIGESVAPVLQTCEVRAVAADAQWLSPAHGRDTLAVHFTWVEDMAAVLPVVRRVEAALDAYDARPHWGKVFTTPPSVLRARYPRLDDFRALTRELDPAGKFANAFVREVLTG

SEQ ID NO: 77 - protein, 415 aa, Streptomyces sp.
MTTETLTNWARNITYTAKELHRPHSLDALWARVADSGRVRVLGSGHSFNEIAEPGADGVLLSLTALPPVIEVDTAARTVRVGGGVRYAELARAVHAHGLALHNMASLPHISVAGSVATGTHGSGDGNGPLAAAVREVELVTADGTTLSLARGDDRFGGAVTSLGALGVVTTLTLDLEPAFEVSQHVFGQLPLDGLDFAAVSASAYSVSLFTRWRHSGFDQVWVKRRTDQAPLDFPWAAPATEAMHPVPGMPAVNCTEQFGVPGPWHERLPHFRAEFTPSSGDELQSEFLLPRSHAMAALRELDRIREAVAPVLQVCEVRTVAADGQWLSPSHGRDTVALHFTWVADAKAVLPVVGRVEEALAPFEARPHWGKVFTVPAGTLRGLYPRLGDFGKLADAVDPRGKFRNAFVRDVLGA

SEQ ID NO: 78 - protein, 422 aa, Streptomyces sp.
MTDAGTALTNWAGNITYSAKELHRPQSLDALRALVADSAKVRVLGSGHSFNEIAEPGADGVLLSLTALPPSVEVDTAARTVRVAGGVRYAELARVVHGHGLALPNMASLPHISVAGSVATGTHGSGVTNGSLASAVREVELVTADGSAVRIGRGDDRFDGAVTALGALGVVTALTLDLEPDYRVAQQVFTELPLAGLDFDAVAASAYSVSLFTGWRTSGFAQVWLKRRTDRPSADFPWAAPATEAMHPVPGMPAVNCTQQFGVPGPWHERLPHFRAEFTPSSGAELQSEYLLPRPYALDALHALDAVRETVAPVLQICEVRTVAADAQWLSPAYGRDTVALHFTWVEDLAAVLPVVRRVEEALDPFDPRPHWGKVFAVPARVLRGRYPRLGDFRALVDSLDPGGKFTNAFVREVLGSGDRPS

SEQ ID NO: 79 - protein, 414 aa, Streptomyces sp.
MTDTLTNWAGNIAYTAKELHRPHSIEEVRALVAGSRAVRVLGSGHSFNEIAEPGSEGVLLSLTALPPVVEVDTAARTVRVGGGVRYAELAAAVHRHGLALANMASLPHISVAGSVATGTHGSGNANGPLASAVREVELVTADGEVVVIGRGDARFGGAVTSLGALGVVTALTLDLEPAFEVSQHVYVDLPLAGLDHAAVAATAYSVSLFTDWREPRFNHVWVKRRTDEPPVDFPWAAPATAAVHPVPGIPAGNCTQQFGVPGPWHERLPHFRAEFTPSSGAELQSEYLLPRQHALDALHALDAVREVIAPVLQTCEVRTVAADEQWLSPSFGRDTVALHFTWIDDTAAVLPVVRRVEEALDPYEPRPHWGKIFTVPSAVLRERYPRLGDFRALAEELDPAGTFRNAFVRDVLGG

SEQ ID NO: 80 - protein, 414 aa, Streptomyces sp.
MTQSVTNWARNITYGAKEFHRPHSLDALRALVAGSTKVRVLGSGHSFNTIADPGADGVLLSIAGLPPVLEVDTAARTVRVSGGVRYAELARAVHAEGLALPNMASLPHISVAGSVATGTHGSGVGNGPLASAVRTVELVVADGSTVTLARGEEGFDGAVTSLGALGVVTALTLDLEPSYEVEQHLFTELPLDGLDFDAVAGAAYSVSLFTDARAAGFRQVWVKRRTDQAPVDFPWAAPATVALHPVPGMPAENCTEQFGVPGPWHERLPHFRAEFTPSSGAELQSEYLLPRSSALDALYAVDGIRETVAPVLQTCEVRTVAADRQWLSPAHGRDSVAVHFTWVEDAAAVLPVVRRVEEALEGFGPRPHWGKVYAMSAYDVRRRYARLTDFLALAHTLDPTGKFTNAFVRDALGV

SEQ ID NO: 81 - protein, 414 aa, Streptomyces sp.
MAKTLTNWAGNISYTPTELHRPGSLDALRALVAGSARVRVLGSGHSFNEIADPGADGVLLSLAGLSPEIDVDTTARTVRVGGGVRYAELARAVHGRGLALPNMASLPHISVAGSVATGTHGSGVGNGPLAAPVREVELVTADGSTVTIARGEERFGGAVTALGALGVVTALTLDLEADFEVEQYVFTELPLDGLDFEAVAGAAYSVSLFTDWRAPGFGQVWVKRRTDQAAPDFPWAAPATEAMHPVPGMPAVHCTEQFGVPGPWHERLPHFRAEFTPSSGEELQSEYLLPRPYALDALRSLDAIRDVVAPVLQVCEVRTIAADTQWLSPAYGRDSVALHFTWVADTDAVLPVVRRVEAALNPYGSRPHWGKVFAVPAEVVRGRYPRLADFAALAAYLDPSKKFTNAFVRDVLGD

SEQ ID NO: 82 - protein, 426 aa, Streptomyces sp.
MTETASVTGETAPVTNWAGNITYTAKEVHRPRTLDALRAVVAGSVRARVLGSGHSFNAIAEPGPEGVLLSLSELPAGIDVDTAERTVRVSGGVRYAELARAVHRHGLALANMASLPHISVAGSVATGTHGSGVGNAPLAAAVREVELVVADGSVVRIARGDERFGGAVTSLGALGVVTALTLDLEPAYEVEQHVFTELPAAGLDLAGFEAVMGAAYSVSLFTDWGAPGFRQVWVKRRTDQPYAGFDRAAPATEAMHPVPGMPAVNCTAQFGVAGPWHERLPHFRAQFTPSSGDELQSEYLLPRASAIDALSALDAVRGAVAPVLQTCEIRAVAADEQWLSPAHGRDSVAVHFTWVADTAAVLPVVRRVEAALDAFGARPHWGKVFTVPPAVLRERYPQLGEFAALAAELDPSGTFANVFVRDVLAG

SEQ ID NO: 83 - protein, 425 aa, Streptomyces sp.
MSRTVTNWARNITYEAGEFHRPETAGALRSLVARSSRVRVLGSGHSFNRIAEPGGDGVLVSLAALPPVTDVDTAARTVRVSGGVRYAELARAVHAHGLALPNMASLPHISVAGSVATGTHGSGVANGPLAAAVREVELVTADGSTVTVARGDARFDGAVTSLGALGVVTALTLELEPAYEVEQYVFTELPLTGLDYGAVAGAAYSVSLFTDWREPGFRQVWVKRRTDQAPVDFPWAAAATEAMHPVPGMPAQNCTGQFGVPGPWHERLPHFRAEFTPSSGAELQSEYLLPRASAVDALHALDAVRTTVAGVLQTCEVRTVAADPQWLSPAHGRDSVALHFTWIEDTSAVLPVVRRVEEALSGFDARPHWGKVFTVPSAELRLRYPRLADFRALAESLDPAGKFTNAFVRDVLGDQDRRGFSHPLS

SEQ ID NO: 84 - protein, 414 aa, Streptomyces galbus
MAETVTNWAGNISYAAKELHRPRSLDALRAVVAGGSRVRVLGSGHSFNRIAEPGPDGVLLALDALPLEADVDTAARTVRVGGGVRYAELARRVHAHGLALPNMASLPHISVAGSVATGTHGSGVANGSLAAPVREVEIVTADGDLVRIARGDARFGGAVTSLGALGVVTALTLDLEPAFEVEQHTFTELPLEGLDYETVAAAAYSVSLFTDWRAPGFRQVWLKRRTDQPLRAFPWATPATHALHPVPGMPAENCTEQFGVPGPWHERLPHFRAEFTPSSGAELQSEYLMDRSSATGMLSAVDRIRQTVAPVLQTCEVRTIAADDQWLSPAYGRDSVALHFTWIEDTQAVLPVVRAVEEALAPFAARPHWGKVFAMPSPVVRGLYARMGEFAGLVRELDPAGKFTNAFVRDLLDG

SEQ ID NO: 85 - protein, 415 aa, Streptomyces sp.
MTVTNWAGNITYSAAEPYRPRSLEELRALVAGAAAVRVLGSGHSFNEIAEPGAGGVLLSLDALPAGTDVDTAARTVRVGGGMRYAELARRVHAHGLALPNMASLPHISVAGSVATGTHGSGVGNGPLGDAVREVELVTADGSTVVIGRDDARFGGAVTSLGALGVVTALTLDLEPAYEVEQHLFTELPADGWDFETVAAAAYSVSLFTDWRDPGFRQVWLKRRTDQPLTAFPWAVPAKVALHPVPGMPAGNCTEQFGVPGPWHERLPHFRAEFTPSSGAELQSEYLLPRRHAERALRALHEVREAVAPVLQTCEVRTVAGDRQWLSPSYGRDTVAVHFTWIEDTASVLPAVRRVEEALEPFEPRPHWGKVFTTPAEVLRERYPRLGDFRRLVAELDPAGKFTNAFVRRVLGGGGA

SEQ ID NO: 86 - protein, 417 aa, Streptomyces sp.
MTEPTGPLTNWAGNITYAAKELHRPHSLDALRTLVARSARVRVLGSGHSFNEIADPGSEGVLLSLTALPPSVEVDTAARTVRVAGGVRYAELARRVHEHGLALHNMASLPHISVAGSVATGTHGSGNTGGSLASAVREVELVTADGSTLTIGRGDARFGGAVTALGALGVVTALTLDLEPDFEVAQHVFTEFPLAGLDFDAVSATAYSVSLFTDWRQPGFVQAWVKRRTDQLLNDFPWAAPAAVAMHPVPGMPAENCTQQFGVPGPWHERLPHFRAEFTPSSGAELQSEYLLPRPYALDALRALDAIRETIAPVLQICEVRTVAADSQWLSPSYGRDTVAFHFTWIEDTAAVLPVVARVEKALAPFDPRPHWGKVFTTPPSELRERYPRIGAFTALAEELDAAGTFRNRFVREALGL

SEQ ID NO: 87 - protein, 460 aa, Streptomyces sp.
MGGTVTEGPGQDETGQDGAGQDGAGQDETGQDETGQDGAAARRRPAGGRPWRNWAGNIVFAAGELHRPQSPDALRTLVAGSGRVRVLGSGHSFNRIAEPGADGVLVSLDALPAEIDVDTAARTVRVGGGVRYAALARRVHEHGLALPNMASLPHISVAGSVATGTHGSGVRNGSLASAVRQVEIVTADGSTVVIGRDDARFGGAVTSLGALGVVTALTLDLEPAYEVEQHLFTELPLDGLDFEAVAGAAYSVSLFTDWRAPGFRQVWLKRRTDEPLAAFPWATPATEALHPVPGMPAVNCTEQFGVPGPWHERLPHFRAEFTPSSGEELQSEYLLPRSAADGMLYAIDGIRETVAGVLQTCEVRTVSADDQWLSPAHGRDTVAVHFTWIADTPAVLPVVRQVEAALEPFSPRPHWGKVFEIPAPALRERYPRVEEFAALVRELDPAGKFANAFVRDVLGT

SEQ ID NO: 88 - protein, 416 aa, Streptomyces sp.
MTERVGNWAGNITFGAKELHRPRSLDALRDLVAGSAKVRVLGSGHSFNEIADPGPAGVLLSVADLPPVIDVDTTARTVRVSGGVRYAELARTVHGHGLALANMASLPHISVAGSVATGTHGSGVGNGSLASAVRAVELVTADGAQMTLARGDDAFGGAVTSLGALGVVTALTLDLEPDYLVEQYVYEELPLEGLDFEAVAGSAYSVSLFTDWRRPGFRQVWRKRRTDEPLSDFPWARPATEPLHPVPGMPAVNCTEQLGVAGPWHERLPHFRAEFTPSSGAELQSEYLLPRGSALAALHAVDEIRQTVAPVLQTCEVRTIAADEQWLSPAYGRDSVALHFTWIEDTAAVLPVVRRLEAALDPFGARPHWGKVFTVPGAELRERYPRLGDFGALRERLDPAGTFTNAFLADFVDPLS

SEQ ID NO: 89 - protein, 414 aa, Streptomyces sp.
MAETVTNWAGNITYTAKELHRPHSLDALRTLVAESDHVRVLGSGHSFNEIAEPGVDGALVSLAGMPAEVDVDTAARTVRVGGGVRYAELARRIHEHALALPNMASLPHISVAGSVATGTHGSGIRNGSLAAPVREVEIVTADGSTVVVGRGDERFGGSVTSLGALGAVTALTLDLEPDFEVEQHVFTELPLAGLDFETVAATAYSVSLFTDWREPGFRQVWLKRRTDQPLPDFPWAAPATEKMHPVPGMSAVNCTEQFGVAGPWHERLPHFRAEFTPSSGAELQSEYLLPRPYALDMLHALDAIRTTMAPVLQTCEVRTVAADTQWLSPAYGRDTVAVHFTWIEDLEAVLPVVRAVEKALDGLDARPHWGKVFAEAPRVVRERYPRLGDFRALAGALDPSGTFANAFVRDILAD

SEQ ID NO: 90 - protein, 418 aa, Streptomyces sp.
MAGTTTGTVTNWAGNITYTPEELHRPGSLDAVRALVARSTRVRALGSGHSFNGIADPGAEGTLLSLEALPSEVDVDTAARTVRVGGGVRYAELARRVHAQGLALPNMASLPHISVAGSVATGTHGSGVRNGPLAAAVREVEIVTTDGSTAVIGRSDARFGGAVTSLGALGVVTALTLDLEPAYGVEQHLFTELPLDGLDFEAVSAAAYSVSLFTDWRDPGFRQVWLKRRTDQPPPAFPWAVPAEVALHPVPGMPAENCTQQFGVPGPWHERLPHFRAEFTPSSGAELQSEYLLPREYAMDALHALEAMGATVAPVLQTCEVRTVAADEQWLSPSYGRDTVAVHFTWTEDTAAVLPVVSRLEEALEPFAPRPHWGKVFTTPTATLRGRYPRLDDFRTLARDLDPTGKFTNAFLADLLTG

SEQ ID NO: 91 - protein, 417 aa, Streptomyces sp.
MTGMTQQVTNWARNITYTAEEYHRPRSLDALRSLVAANARIRVLGSGHSFNGIADPGPDGVLLSIADLPRLLDVDTAARTVRVSGGVRYAELARAVHAHGLALPNMASLPHISVAGSVATGTHGSGIGNGSLAAPVREVELVTADGSTVPVARGDARFDGAVTSLGALGVVTALTLDLEPAYRVEQHVFTELPLAGLDFETVAASAYSVSLFTDWRQPGFRQVWLKRRTDQAPPRFPWAAPATEAMHPVPGMPAVNCTQQFGVPGPWHERLPHFKAEFTPSSGDELQSEYLLPRTAALDALHAVDAIRETVASVLQTCEVRTVAADPQWLSPAHGRDSVALHFTWVDDMAAVLPVVRRLEQALDPFAPRPHWGKVFTAPAAVLRGRYPRLDDFLALAKSLDPTGKFTNAFVRESLGV

SEQ ID NO: 92 - protein, 425 aa, Streptomyces sp.
MAAGRTADMAEPARTVTNWARNITYTAKEFHRPGTLDALRALVAGSARVRVLGSGHSFNRIAEPGAGGVLVSIAGLPPVIEVDGTARTVRVSGGVRYAELARTVHRHGLALANMASLPHISVAGSVATGTHGSGVGNGPLAAAVREVELVLADGSTVSVARGDARFDGAVTSLGALGVVTALTLDLEPAYEVEQHVFTELPLDGLDHEAVAASAYSVSLFTDWREPGFRQVWLKRRTDRAPVDFPWAAPAAEALHPVPGMPAVNCTRQFGVPGPWHERLPHFRAEFTPSSGAELQSEYLLPRSAAVDALYAVDGVRSAVSGVLQTCEVRTVAADPQWLGPAYGRDSVALHFTWIADTAAVLPVVRRLEEVLEPFDPRPHWGKVFTMPSAVVRRRYARLADFRALAASLDPTGKFANTFVRELLGD

SEQ ID NO: 93 - protein, 415 aa, Streptomyces griseoviridis
MTAQTVTNWAGNITYVAKEVHRPRSLEALGALVAGSARVRVLGSGHSFNRIAEPGPEGVLLSLAELPPVIDVDTAARTVRACGGVRYADLARVVHAHGLALPNMASLPHISVAGSVATGTHGSGVGNGPLASSVREVELVTADGSSLTLGRGDARFGGAVTSLGALGVVTALTLDLEPAFEVEQHLFTELPLAGLDFEAVAGWAYSVSLFTDWRREGFRQVWLKRRTDQPLADFPFAAPATVALHPVPGVPGVNCTEQFGVAGPWHERLPHFRAEFTPSSGKELQSEYLLPRPSAIPALQALDAVREVIAPVLLTCEVRTVAADEQWLSPAYGRDSVAFHFTWVDDLTAVLPVVGRVEAALEAFEPRPHWGKVYSVPAPVVRGRYPRLGEFRELAGALDPAGKFANAFVRDALGD

SEQ ID NO: 94 - protein, 414 aa, Streptomyces sp.
MTESVRNWAGNVTFAASGTHRPRTLDALRSLVASAARVRVLGSGHSFNRIADPGADGMLLSLDALPAETDVDTAARTVRVGGGVRYAELARRVHARGLALPNMASLPHISVAGSVATGTHGSGVRNGSLAAAVREVEIVTGDGSVLTVGRGDERFGGAVTSLGALGAVTALTLDLEPAFEVEQHVYTDLPLEGLDFEAVAGAAYSVSLFTDWREPGFRQVWLKRRTDQQAAVFPWAAPATRALHPVPGMPAVNCTEQFGVAGPWHERLPHFRAEFTPSSGDELQSEYLLPRADALGALRALDGVREQVAPVLQVCEVRTVAADEQWLSPAYGRDSVAVHFTWVADAETVLPAVRAVEAALTPFSPRPHWGKVFAMPAAEVRGRFPRLGDFAKLVRETDPAGKFTNAFVRDVLSG

SEQ ID NO: 95 - protein, 417 aa, Streptomyces sp.
MTDPVQTVTNWARNITYTAKEFHRPHSLDALRALVAGSARVRVLGSGHSFNRIADPGPAGVLVSIAELPSAIEVDTAARTVRVAGGVRYAELARAVHAHGLALPNMASLPHISVAGSVATGTHGSGVANGSLAAPVREVELVLADGSTRTLARGDAGFEGAVTSLGALGVVTALTLELEPAYRVEQTVYVELPLEGLDFTAVSGAAYSVSLFTDWREPGFRQVWVKRRTDRPAVDFHWAAPATEAMHPVPGMPGRNCTEQFGVPGPWHERLPHFRAEFTPSSGDELQSEYLLPRSTALDALHAVDGIRRTVAPVLQTCEVRTIAADPQWLSPAHGRDSVALHFTWTDDTAAVLPVVRELEAALEPFDPRPHWGKVYTAPAELLRGRYPRLDDFRSLVRTLDPGGKFANPFVQDVLGV

SEQ ID NO: 96 - protein, 414 aa, Streptomyces echinoruber
MAETVTNWAGNIAYTAKEVHRPRTPDALRSLVAGSERVRVLGSGHSFNTLAEPGAEGVLVSLAALPAEVDVDTAARTVRVGGGVTYAELARRVHAEGLALPNMASLPHISVAGSVATGTHGSGVANGPLAASVREVELVTADGSVVTIGRGDPRFDGAVTSLGALGVVAALVLELEPGYEVEQHVFTELPLQGLDYETVAAAAYSVSLFTDFAAPGFRQVWLKRRTDQPLAAFPWAAPATVPLHPVPGMPARNCTEQLGVPGPWHERLPHFRPEFTPSSGAELQSEYLLPRARALDALHALDAIRDAVAPVLRVCEVRAVAADAQWLSPAYRRDSVALHFTWVADTEAVLPVVGRLEEALDAFDPRPHWGKVFTVPPAVLRERFPRIGDFRALARELDPAGKFSNAFVRDVLGG

SEQ ID NO: 97 - protein, 415 aa, Streptomyces griseoaurantiacus
MTRDTVTNWAGNIIYTAEELHRPRSLDALRAVVADSARLRVLGSGHSFNEIAEPGADGVLLSLDALPSEVAVDTAARTVRVGGGVRYAELARVVHAHGLALPNMASLPHISVAGSVATGTHGSGVANGPLAAAVREVELVTADGSTLVVGRDDPRFDGMVTSLGALGVVTALTLDLEPDYEVAQHVFTELPLEGLDYEAVAASAYSVSLFTDWRAPGFRQVWLKRRTDQAEVDFPWAAPATEKMHPVPGMPAVNCTEQFGVPGPWHERLPHFRAEFVPSSGAELQSEYLLPRGHATAALHAVEEIGAVLAPVLQTCEVRTIAADAQWLGPAYGRDSVALHFTWVEDTELVLPVVRRLESALDGFDARPHWGKVFTTAPATLRARYPRLADFAALAAELDPAGTFRNAFVEAVLAG

SEQ ID NO: 98 - protein, 430 aa, Streptomyces scabiei
MALDSYGSRSAEDSRMTTETLTNWAGNITYTAKELHRPHSADALRALVAGSERVRVLGSGHSFNEIAEPGPGGVLLSLTGLPTTIDVDTAARTVRVGGGVRYAELARAVHARGLALHNMASLPHISVAGSVATGTHGSGDGNGPLAAAVREVELVTADGSALTLTRGDDRFGAAVTSLGALGVVTALTLDLEPAFGMTQHVFGELPLDGLDFAAVTASAYSVSLFTRWQHSGFDQVWVKRRQDRPVTEFPWAEPAAEAMHPVPGMPAVNCTEQFGVPGPWHERLPHFRAEFTPSSGEELQSEYLMPRPFALDALRALDSIRHAVAPVLQVCEVRTMAADEQWISPAEGRDTVALHFTWIADAAPVLPVVRRVEEVLAPFDARPHWGKVFTVPAAELGPLYPRLGDFRRVADGLDPAGKFRNAFVREVLGA

SEQ ID NO: 99 - protein, 416 aa, Streptomyces griseoluteus
MTKSARAVTNWARNITYTADEFHRPTSPDALRALVADSGRVRVLGSGHSFNRIADPGAGGVLLSVAGLPPVIDVDTTARTVRVGGGVRYAELARTVHAHGLALANMASLPHISVAGSVATGTHGSGVGNGPLASAVREVELITADGGTLRIARGDARFDGAVTSLGALGVVTALTLDLEPAYEVEQHVFAELPLEGLDYETVAASAYSVSLFTDWRAPGFRQVWLKRRTDQAPVDFPWAEPAAGAMHPVPGMPAVNCTEQGGVPGPWHERLPHFRAEFTPSSGSELQSEYLLPRADAPAALHALEAIRTTLAGVVLTCEVRTVAADAQWLSPAYGRDSVALHFTWIEDAAAVLPVVRAVEAALGALDARPHWGKVFEMPAAVVRERFPRLADFRALVAGLDPAGKFANAFVREILS

SEQ ID NO: 100 - protein, 413 aa, Streptomyces glomeroaurantiacus
MAEALTNWAGNITYSAKELQRPRSLDALRALVAGSERVRVLGSGHSFNLIADPGPEGVLLSLTALPPSIEVDTAARTVRVAGGVRYAELARAVHGQGFALPNMASLPHISVAGSVATGTHGSGNTNGSLASPVREVELVLADGSDLTIGRDDPRFDGAVTSLGALGVVTALTLDLAPDFEVAQHVFRELPLAGLDFETVSASAYSVSLFTDWRRSGFVQAWVKRRTDVPWDGFPWAEPSAEAMHPVPGMPAVNCTQQFGVPGPWHERLPHFRPEFTPSSGSELQSEYLLPRSYAVDALHAVDAIRETVAPVLQICEVRTVAADSQWLSPAYGRDTVALHFTWVEDTAVVLPVVRRLEEALAPFAPRPHWGKVFAVTAAAVRERYPRMGDFKALAEGLDPRGTFRNSFVSEVLG

SEQ ID NO: 101 - protein, 417 aa, Streptomyces achromogenes
MTDVTETVTNWARSITYTAKEFHRPRSVEELRAVVAGGAKVRVLGSGHSFNRIADPGEEGVLVSIAGLPPVIDVDTAARTVRVSGGVRYAELAQAVHARGLALPNMASLPHISVAGSVATGTHGSGVGNGPLAVAVREVELLTADGSTVTIGRGDARFDGAVTSLGALGVVTALTLDLEPAYEVEQYVFTELPLEGLDFEAVAGSAYSVSLFTDWRRPGFRQVWVKRRTDQPAVDFPWAEPATEALHPVPGMPAANCTRQSGVPGPWHERLPHFRAEFTPSNGEEIQSEYLLPRAAALDALHAVDAVRETVAGVLQICEVRTIAADAQWLSPAHARDSVALHFTWVRDEPAVLPVVRRLEEALAPFDPRPHWGKVFGIPAADLRDRYARLADFRALARTLDPAGTFTNGFVRDLLGE

SEQ ID NO: 102 - protein, 418 aa, Streptomyces sp.
MAETVTNWAGNITYTAKEVWRPRTVDELRALLPGCERTVRVLGSGHSFNTVADPGPEGVLLSLAGLPAEIDVDTAARTVRVGGGVRYAELARRVHAHGLALGNMASLPHISVAGSVATGTHGSGVTNGSLASAVREVEVLMADGRRGRIGPDDHRYGGAVTSLGALGVVVALTLELEPAYEVEQHVFTELPLDVLDEETFETVMAAAYSVSLFTDWRAPGFRQVWLKRRTDQPLPDFPWAAPATEKKHPVPGMPAVNCTEQFGVPGPWHERLPHFRPDHVPSSGAELQSEYLMAREHAVPALRALDALRESLAPVVQTCEVRTVAADEQWLSPAYGRDSVAVHFTWVADTAAVLPVVRRVEAALDAFAPRPHWGKVFTTPPRTLRERYPRLWDFGQLIRPADPSGMFTNAFLREMLGL

SEQ ID NO: 103 - protein, 419 aa, Streptomyces sp.
MTPAEKNWAGNITFGARRLRVPRSVRELREVVAASDAVRPLGTRHSFNTVADTTGDHLSLAGLPRVVEIDVPGRTVAVSAGLRFGEFAAELHERGFALANLGSLPHISVAGAVATGTHGSGVGNRSLAGSVRKLSLVTADGGMRILGRTDEDFAGAVVSLGALGVVTSLELDLVPAFEVRQWVYEDLPEATLTARFDEVMSAAYSVSVFTDWSPGPVGQVWLKQRTESGEPAEVPAEWLGARLADGPRHPIPGVPAVNCTRQQGAPGPWYRRLPHFRMEFTPSNGDELQSEYFVARADAVAAYESLARLRDRITPVLQISEIRAVAADDLWLSPAHGRDSVAFHFTWVPDAAAVAPVVEEIEAALAPFGARPHWGKVFSTDPEVLRTLYPRYADFEVLMAGHDPEGVFRNPFLDRYFRR

SEQ ID NO: 104 - protein, 419 aa, Streptomyces sp.
MTPAEMNWAGNVTFGARRLCVPRSEAELRETVAASTSVRPLGTRHSFNDVADTTGDLLSVAGLPRVVEIDPAGGTVTVSAGLRFGEFAGELHEGGFALHNLGSLPHISVAGACATGTHGSGVGNRSLAGAVRALDMVTADGGTLSLRRGDEEFPGAVVAMGALGVVTRLTLDVVPAFDVQQWVYEDLPESRLTGAFDEVLSAAYSVSVFTDWRPGPVGQVWLKERVGSGGVRQAPAEWLGARLADGPRHPIPGVPAGNCTRQQGAAGAWHRRLPHFRLEFTPSNGDELQSEYFVAREDAAAAYEALGRLRDRIAPLLQISEIRTVAGDDLWLSPASGRDSVAFHFTWIPDTVAVAPVLGEIEEALAPFGARPHWGKVFTTDPGVLRTLYGRYADFEKLMARYDPHGTFRNDFLDRHFPG

SEQ ID NO: 105 - protein, 415 aa, Streptomyces sp.
MRNWAGNVAFRARRARTPSSVAELQELVAASGEVRALGTGHSFSTLADTGGDLVSVAGLPRLVEVDEQAGTVGVSAGMRFGEFTGALHEAGFALHNLGSLPHISVAGACATGTHGSGHRLGSLATAVRALELVTAGGELLAWERGDQEFAGAVVSLGALGIVTRVTLDLVPAYDVQQWVYEGLPLRQLYERFDEVMSAAHSVSLFTTWRTDRIDQVWLKRRVGAEGPQPAAPRWLDATLADGPRHPVPGQPATFCTRQDGVPGPWHARLPHFRLEFTPSSGEELQSEYFVARSDAVAAFQALHRIRARMAPVLQVGEVRTVAADDLWLSPGHQRDTVAFHFTWIPDTAAVTPVLEAVERALSPFGARPHWGKLFTMRPQDVGGLYERYEDAQRLMARLDPAGKFRNEFVERYFPR

SEQ ID NO: 106 - protein, 435 aa, Micromonospora pisi
MTPPSTTGPTPAPATDARSNWAGNITFGARRFHRPSSVAELRRLVAGSERVRALGTGHSFNDIADTSGDLVSVAGLPERVEIAQDGRTVTVSAGIRYGDLAARLHARGHALHNLGSLPHISVAGACATATHGSGERNGNLATAVRAMELVTADGELVTVSRETDGDRFPGMVVGLGALGVVTALTLEIEPSYDLRQYVYQDLPGAELHNRLDDVLGAGYSVSLFTDWTGTGIDQVWRKLRVDGDDSPATSDWYGATLATRPLHPVPGMSAVNCTEQLGVPGPWHTRLPHFRLEFTPSSGEELQSEYFVARTDARDALDALATVRDRIAPVLQISEIRTVAADDLWLSPSYRRDSVALHFTWVKDTSAVTPVLAAIEERLAPFAARPHWGKLHGVDPEVVRGRYPRWSDFIALRDEYDPRGKFRNEWSDRYLPTDH

SEQ ID NO: 107 - protein, 420 aa, Micromonospora sp.
MTGRPTNWAGNITFDAARLHRPGSVADLRAMVAGSDRIRALGTGHSFNRIADTTGDLVSVAGLPPVVEIDHDRAQVTVSAGLRYGEVAARLHEAGLALHNLGSLPHISVAGAVATGTHGSGLANGSLATAVAAVELVTADGELRTLTRDTDRDDLLGAVVGLGALGVVTRLTLDLVPTFDVAQYVYDDLPWARIATDQAELFGAGYSVSLFTDWAGRRFNQVWVKRRVDAGAPEPEPRWLDATLADAPRHPVPGMPAVHCTPQLGVPGPWHTRLPHFRLEFTPSSGAELQSEYFVARHHLVEALAALEDIADRIAAVLQISEIRTVAADELWLSPAYRRDSAALHFTWVADAEAVQPVIAAIEERLAPYAARPHWGKLFGVPPEALRDRYPRYADFAALTRRYDPTGKFRNDLLDTYFPA

SEQ ID NO: 108 - protein, 419 aa, Streptomyces atratus
MTPAEKNWAGNITFGARRLSMPRSEAELRETVSASAALHALGTRHSFNTVADTRGDLVSVAGLPRRVEIDREAGAVTVAAGLRLGEFADVLHENGYALHNLGSLPHISVAGACATGTHGSGVGNGSIAGAVRALDMVTADGRNVSLRRGDADFPGAVVAMGALGVVTALTLDVVPAFEVQQWVYEDLQEARLTSSFDEVMSAAYSVSVFTDWREGPLNQVWLKQRVGSEGPQRAPEEWFGARLADGPRHPIAGMPAENCTRQQGVAGPWHRRLPHFRLEFTPSNGDELQSEYFVARQDAPAAYAALGRLRERIAPLLQITEIRTVARDDLWLSPAGGRDSVAFHFTWVPDTAAVTPVLGAIEEALAPFGARPHWGKVFTTTPGTLRTLYGKYADFERLAARFDPEGKFRNDFLARHFLR

SEQ ID NO: 109 - protein, 486 aa, Streptomyces sp.
MRTGSELVPFRAGSLGLWATVRIWKVPESDSVRTCTSPVAWLHQQVCLGGCTAGITTPGHERKWGRAVTPAEKNWAGNITFGARRLGVPRSEAELRETVSASTAVHALGTRHSFNTVADTRGDLVSVAGLPSRVEIDREAGAVTVAAGLRFGEFADVLHENGYALHNLGSLPHISVAGACATGTHGSGVGNSSIAGAVRALDMVTADGRNVSLSRGDADFPGAVVAMGALGVVTALTLDVVPAFDVQQWVYEDLPESRLTGSFDEVMSAAYSVSVFTDWREGPLNQVWLKRRVGSDGPQRAPEEWLGARLADGPRHPIAGMPAENCTRQQGAAGPWHRRLPHFRLEFTPSNGDELQSEYFVARQDAPAAYEALGRLRERIAPLLQITEIRTVARDDLWLSPAGGRDSVAFHFTWMPDTAAVTPVLGAIEEALAPFGARPHWGKVFTTTPGTLRTLYGKYADFERLAARFDPEGKFRNDFLARHFLR

SEQ ID NO: 110 - protein, 436 aa, Streptomyces sp.
MRCPGAPARPRVEEGRTVTPAEMNWAGNITFGARRLCTPRSVVELRETVAASDAVRALGTRHSFNAVADTAGDLVSVAGLPRVVDIDPARRTVRLSAGLRFGEFAAELHERGFALHNLGSLPHISAAGACATGTHGSGVGNRSLAGCVRALDLVTADGGTRTLRRGEPDFAGAVVSLGALGVVTALELDVVPAFDVQQWVYEDLPEAALTEGFDEVMAAAYSVSVFTDWSPGPVGQVWLKQRVGDEGPRPMPAEWLGARLADGSRHPIPGVPAGNCTRQQGVPGPWHRRLPHFRLEFTPSNGDELQSEYFVARRDAAAAYEALARLRERIAPVLQISEIRGVAGDDLWLSPAYGRDSVAFHFTWVPDAAAVAPVLAGIEDALAPFGARPHWGKVFGTAPGVLRTLYPRYGDFEELMARHDPSGTFRNDFLDRHFPG

SEQ ID NO: 111 - protein, 426 aa, Micromonospora echinofusca
MSGTLHNWAGNVTFTARRLHRPESVDELRRLVARAGRVRALGTGHSFNRLADTDGDLVSLAGLPPLVRIDPRRHTVTVAAGVRYGELAARLHREGYALTNLASLPHITVAGACATGTHGSGDRVGGLATAVAGLDLVTATGELVRLTRDDDPRFPGAVVALGALGVVTALTLDLVPHYDVAQRVYRDLPFAALVERHAEIFASGYSVSAFTDWAGPTVDQVWVKQVVAAPPLSVDALPLSDGGPERWGARPAAGPCHPVHGMPVENCTTQLGVPGPWHTRLPHFRLDFTPSSGAELQSEYLLPRARAAEALTAVDAIRHRIAPVLQVSEVRTVAADDLWLSPAYRRDSLAIHFTWIADTAAVTPVIDAVEEALAPLAPRPHWGKLFRTDVERVQAGYDRLADFRALRRDLDPDGRFGNELVDRYLD

SEQ ID NO: 112 - protein, 430 aa, Streptomyces halstedii
MDMIDHSVRSPSAPRQNWARNITFAARRLHTPASVAELQDIVAAGTAIRALGTGHSFNTVADTDGDLVSVAGLPRAVEIDPAAATATVSAGLRFGELTGELHRAGFALHNLGSLPHISVAGACATGTHGSGVANRSLAGAVRALELVTADGTLTTVRRGDADFPGAVVSLGALGVVTRVTLDLVPAFEVQQWVYEGLPQERLLDRFDEVMSDAYSVSLFTTWRDGPVDQVWLKRRVGEDGPGTAPRRWLGAERAAAPRHPVPGMPARHCTEQDGVPGPWHTRLPHFRLEFTPSNGDELQSEYFVDRRDAVAAYEALDRIRDRVAPLLQIGEIRTVAADDLWLSPAQGRDSVAFHFTWVPDDAAVTPVVGAIEEALAPFRARPHWGKVFTTAPGSLRALYGHYADFERLARRLDPAGTFRNDFLARHFPLH

SEQ ID NO: 113 - protein, 430 aa, Streptomyces sp.
MIDHSEHGPSARRTNWAGNIAFGAKQLHTPASITELQELVSAGTAVRALGTGHSFNTVADTHGALISVAGLPRSVEIDPEARTATVSAGMRFGELTGTLHRSGLALHNLGSLPHISVAGACATGTHGSGVGNRALAGAVRALELVTADGSVRTLERGDADFPGSVVSLGALGVVTRLTLDLVPAFEIQQWVYEGLPQEELLGRFDEVMSEAYSVSLFTGWHGGPIDQVWLKRRVEPGTPGTAPHRWHGSTLAQAPRHPVPGVAAEHCTEQQGVPGPWHARLPHFRLEFTPSNGDELQSEYFVARQDAVAAYEALDRIRQDFAPLLQIGEIRTVAADDLWLSPAQGRDSVAFHFTWVPDTAAVTPVLGAVEEALAPFAARPHWGKVFTTPPGVLRELYDHYADFERLTERFDPTGTFRNDFLAHHFPRTGG

SEQ ID NO: 114 - protein, 418 aa, Streptomyces sp.
MNEAVTNWAGNIRFGAQRFHVPTSVEELQKLVAGSPSVRALGTGHSFNAIADTRGDLVSTSGLPKVIDVDRRAGTVTVSSGLRFGEFTGALHEAGFALHNLGSLPHISVAGACATGTHGSGVRNGSLASAVRALDYVCATGDVVSLARGDEHFAGSVVALGSLGIVTRLTLDLVPAFDIQQWVYEGLPHEALRRGFDEVMSAAYSVSLFTRWQGDRIDQVWLKRRVGAEGPRPAPEQWLGAALSDGARHPVPGMPPESCTPQSGVPGPWQARLPHFRLEHTPSSGDELQSEYFVAREDAAAAFDALHRVRERIAPHLQIGEIRSVAADDLWLSPACHRDSVAFHFTWLPDTAAATTALRVVEDALSPFGARPHWGKLFIAGPESVRGLYEHYDRFGQLMATCDPTGKFRNDLVRRYFA

SEQ ID NO: 115 - protein, 415 aa, Streptomyces sp.
MKLTNWARNVTFAPEQFEEPESLDHLQRLIAKASPVRVLGTGHSFSAVAATDGLMVSLARLPRTIRIDPGAGTVTVSAGARYGDLMGPLHAAGLALHNTGSLPHISVAGACATGTHGSGSANGSLATAVVELEFIGPDGTVNTLRRGHPDFPGCVVALGLCGVVTALTLRTKPTYRIRQFVYDNLPLDALIGDFDAVMDSAYSVSAFTRWREPVAETVWRKQLAEASVPPSAWMGARLATEQRHPIAGMPVGHATEQLGDPGPWHRRLPHFRLDFTPSSGAEIQSEYLLPRRHAATALKALSAVRASIAPALQVCEIRTVAADDLWLSPAYQRPSVALHFTWINDAAAAAAAVAVVEEALGGLDPRPHWGKVFGMSPDHVRDAFPRIEDFEALVHRIDPAGKFTNAFTDRFIRTS

SEQ ID NO: 116 - protein, 437 aa, Streptomyces tateyamensis
MTVAATNWAGNIVFGAERFHQPASVAELQRIVAGSRSLRVLGSGHSFNAIADTAGDLVSVAGLPRSVELDERAGTVTVSAGMRYGELAEVLDRAGYALHNLGSLPHISVAGACATGTHGSGVANGSLATAVRAVELVTADGGLRTIDRGAAQFPGSVVALGALGVVTRLTLDVVPAFEIRQWVYEGLPTAALRERFEEIVAAAYSVSLFTRWRGEQIDQVWIKRRGGPDAPATWHGAALADGPRHPVPGCPPEPCTRQLGVPGRWHARLPHFRLDFTPSSGEELQSEYFVARTDAVAAFDALDAVRDRIAPALQISEIRTVAADALWLSPAYARDCVAFHFTWHPDAVAVAEAVRTVEEALSAFAARPHWGKVFTMAPETVRERYPRWADFGTLLGDFDPAGKFRNEFLARYFPAGADAVSDRLHRPGAAPAVRSAD

SEQ ID NO: 117 - protein, 429 aa, Streptomyces argenteolus
MIDHSAQARSARRTNWAGNITFGAQQIHTPASVAELQDVVAAGTAVRALGTGHSFNTVADTSGSLVSVAGLPHTIEIDQEARTATVSAGLRFGELTDTLHRSGFALHNLGSLPHISIAGACATGTHGSGVGNLCLAGAVSALELVTADGGLVTLRRGEPGFAGAVVSLGALGVVTRLTLDLVPAFDVQQWVYEAFPQDRLLDRFDEVMSEAYSVSLFTGWHGGALDQVWLKHRVTEDGPRTAPDRWHGAKLATGPRHPVPGVAAEHCTQQQGVPGPWHARLPHFRLEFTPSNGEELQSEYFVARHDAVAAYEALDRVRERFSPLLQIGEIRTVAGDELWLSPAQGRDSVAFHFTWVPDSAAVTPALRAIEDALAPFAARPHWGKVFTTEPGTLRELYPHYDAFDRLAARFDPAGKFRNDFLAHHFPRDS

SEQ ID NO: 118 - protein, 423 aa, Streptomyces sp.
MPTTQAPTNWAGNITFSAARLHHPDTVDELRRIVRSADRVRVLGTGHSFNRIADTEGDLVNLDRLPHRVEIDPGKRTATIAAGMRYAHVAQALHAEGLALANLASLPHITVAGACATATHGSGSAQQCLAAAVAGLEIVGPDGEVTRMDRDADRDRLNGAVVGLGALGVVTAMTLDIEPTYDVAQWVWTGLPLDRLDDSFEEIFGAAYSVSVFTDWHSGEGVVWLKCRTDLPDPPEPGQPWLGAVPADRHHHPVPAMPPLHCTEQLGAPGPWHERLPHFRPDFTPSNGDELQSELLLPREAASAAFAALRGLGDRIAPVVQVSEVRTVAADELWLSPAYGRDSVAFHFTWVPDHEAVIEVVAAMEEALLPLGARPHWGKLTTAAPERVLASYDRAADFARLLAEYDPAGKFRNAYLDGYFPTG

SEQ ID NO: 119 - protein, 411 aa, Micromonospora sp.
MSTHRNWAGNVEYAARAYHRPSSVDQLRELVAGSDRLRAVGSGHSFNRLGDTTGDLVTLAGLPATVRLDEQRRVVHVPAAMRYGDVATWLHERGYALANLASLPHISVAGAVATGTHGSGETIGNLATAVAGLDMVTAAGDLLTVDRTDRDFAGMVVALGALGVVTQLTLDVVPTFEVRQYVRLDLPREALDEALASAYSVSVFTDWRSTRGTQVWRKQLTDQPAPPTDWLGTTAADRPWHPVPGMPVANCTEQLGVPGPWHERLPHFRLGFTPSNGDELQSEYHLPRAVAGEALAALDEVASLIAPVAQTSELRTVAADDLWLSPQYDRDSLAVHFTWIADPSAVLPAVVEVERALAPFAPRPHWGKVFAMPTATIAATYPRWTDFAALVARLDPEGTFRTAELDRLFPR

SEQ ID NO: 120 - protein, 443 aa, Streptomyces sp.
MPRTPGRSDVPGGQPLPEQPLTNWAGNIAFRAARIHRPTTVDDLREIVAGSDHVRALGSGHSFNTLADTTGDLVSVAALPADVEVDADARTVTVGAGLRFAAFTGAVHAAGLALHNLGSLPHISVAGACATGTHGSGTGNGSLATAVRALDLVTADGGLRHLRRGDEDFEGAVVALGSTGVVTRMTLDLVPAYDVRQWVYDGLPYDRLRERFDDVLSAAYSVSVFTRWQADERAQVWLKQRAGDTAAGSGPRYGEDRAPDRWLGADLAGGPRHPVPGMDPVTCTPQAGVPGPWHERLPHFRPEFTPSNGDELQSEYFVAREDGPAAFDALARISDRIAPVLQVGEIRTIAGDDLWLSPAYGRDSVAFHFTWIPDTDAVTPVLGAVEEALAPFGVRPHWGKLFTTSPGRMRELYGRYGDFERLTTRLDPHGVFRNELVTRYFPR

SEQ ID NO: 121 - protein, 415 aa, Micromonospora rifamycinica
MSGVARRNWAGNVHYAARAFHQPTTLDELRRLVAGSDRLRAVGSGHSFNRIGDTTGDLVSLAGLPPTVEIDRERGTVTVAAGLRYGDVATRLHEQGLALANLASLPHISVAGAVATGTHGSGDGNRNLAAAVAGLELVTADGEVLTVDRSAGDRFAGMVVALGALGVVTRVTLDVLPTFTVRQYVHEGLPVGSLDAAFASAYSVSGFTTWRSTDIDQVWRKQLADAPPPEPDWLGTTPAGQPAHPVPGMDPVSCTPQFGEPGPWHERLPHFRLGFMPSSGDELQSEYHLPRSAGAEALAALDGMRDRIVPVLQICELRTVAADELWLSPNQGRDTLAVHFTWVADTAAVLPVLAEVEARLAPFAPRPHWGKVFTLDPALVAATYPRYADFVALLTELDPAGVFRTDLLDRYFPRP

SEQ ID NO: 122 - protein, 439 aa, Streptomyces nitrosporeus
MGMIGHSAREASAQRQNWARNITFAARRLHTPASVAELRTVVAAGTALRALGTGHSFNTVADTHGDLVSVAGLPRRIEVDRAAATATVSGGLRFGELTGELHRSGFALHNLGSLPHISVAGACATGTHGSGVTNRSLAGAVRALEFVTADGGLATLERGDAGFQGAVVSLGALGVVTSVTLDLVPAFEIRQWVYEGLPQERLLADFDGVMSQAYSVSLFTSWRDGPLDQVWLKQRTEGTDTATAPRTWYGATLAGGPRHPVPGMPARHCTEQEGVSGPWHTRLPHFRLEFTPSNGEELQSEYFVARTDAVAAYEALDRIRDRIAPLLQISEIRTVASDDLWLSPAQGRDSVAFHFTWVPDTEAVTPVVTAIEEALAPFGARPHWGKVFTTPPAALRGLYPHYADFERLMARTDPAGTFRNAFLEQHFPRTAAGAQDAAR

SEQ ID NO: 123 - protein, 420 aa, Streptomyces sp.
MSPAVRNWAGNITFNAARVHAPSSVERLREIVAGSRSVRALGSGHSFNAIADTRGDLVSVAGLPRHVEVDREAATVTVGGGLRFAEFTGDVHRAGLALHNLGSLPHISVAGACATGTHGSGSGNGTLASAVRSLELVTADGEQLVLERGDADFAGAVVALGALGVVTRMTLDLVPAYDIRQWAYEGLPYGRLRERFDEILSAAYSVSLFTGWRGDELEQVWLKQRVGDPGPWPAPADWFGARPATGPLHPVPGMDPANCTRQAGVPGPWHERLPHFRADFTPSNGDELQSEYFVAAEDGLAAFDALARIRDRIAPVLRIGEIRTVAADDLWLSPAYGRDSVAFHFTWFQDTDAVTPVLDAIEEALEPFAVRPHWGKLFTMEHQRLRGLYERYADFEALTARLDPRGTFRNDLLERYFPGG

SEQ ID NO: 124 - protein, 413 aa, Streptomyces sp.
MTTNWAGNITFSAEVRTPRTLPELQELVRLSEHVRVLGSGHSFNRIADTTGTLVSVAGLPRMAALNAEDDTVTIAAGLRYGEVTAYLQDEGRALHNLGSLPHISVAGACSTGTHGSGDANRPLAAAVTSTTFIAADGELVTLTRDHPDFPGSIISLGALGVTVELELETQPSYEISQVVYDGLPVARLGTDFEEIFSSAYSVSAFTDWVDPDVMVWRKMLAGTPYEQSWLDARVADGARHPIKAMPADFATQQGGLAGPWNERLPHFRLEFTPSNGEELQSEYFVPRAAAAQAFEELKALGRRLAPVLQISEVRTIAADDLWLSPSQGRDTVALHFTWIQDETVVRPVVAALEEALLPLGARPHWGKVFTADAATLRECYPKVPDFIELAAKYDPEGKFRNDYVDTYLPSQIH

SEQ ID NO: 125 - protein, 451 aa, Streptomyces sp.
MQEFRVSEPGPNAARENAVRHTPEGSESAQAAPAVTNWARNIAFNAARVHAPTSVEQLRDIVASSAQVRALGSGHSFNAIADTTGDLVSVAALPKSIDIDTAARTVTVGGGMRFAEFTGAVHEAGLALHNLGSLPHISVAGACATGTHGSGIGNGSLATAVRALEMVTADGSLRTLDRDDEDFAGAVVALGSLGVVTRMTLDLVPRYDVRQWVYEGLSYAALRKNFEDVLSAAYSVSLFTRWRTELIEQVWLKQHEGDQEQPAPRAWLGAVLAEGQRHPVPGMDPVTCTVQGGVAGPWHERLPHFKPEFTPSNGDELQSEYFVAREDGLAAFDALARIAPEIAPVLQIGEIRTVAADGLWLSPAHGRDSVVFHFTWVPDTAAVTPVLTAIEEALAPFGVRPHWGKLFTTGPERLRELYERYADFEALTSAYDPQGTFRNDLITRFFPGGPA

SEQ ID NO: 126 - protein, 411 aa, Micromonospora sp.
MPTHRNWAGNIQYSARAYHRPTTVAELATLVAGSDRIRAVGSGHSFNPLGDTTGDLVTLAGLPADVRLDEERRTVDVPAAMRYGDLASWLHERGYGLANLASLPHISVAGAIATGTHGSGERNGNLATAVAGLELVTATGELRTVHRDSDDFAAMVVSLGALGIVTRVTLDVLPTFDLRQYVHLDLPRPALDEALGSAYSVSVFTDWRSTRGTQVWRKQLADAPAPPAGWLGTTAADRPCHPVPGMPTANCTEQLGVPGPWHERLPHFRLGFTPSSGDELQSEYHLPRADAADALAALDEVAHLIAPVLQISELRTIAADDLWLSPQYHRDSLAIHFTWIADTTRVLPVVAEVERALAPFAPRPHWGKVFTTAPEAIAATYPRWSDFTTLLHHLDPTAKFNTPALNPLFPR

SEQ ID NO: 127 - protein, 438 aa, Streptomyces clavifer
MIDHSAPAPSARQTNWAGNVTFGARRLHTPTSVAELRAVVAAGTAVRALGTGHSFNTVADTRGDLISVAGLPRTIEIDRQARTATVSAGLRFGELTGTLHRSGLALHNLGSLPHISLAGACATGTHGSGVANRSLAGAVRALEFVTADGAILVLERGDADFPGAVVSLGALGVVTRLTLDLVPAFDVQQWVYEGLPQEQLLGRFDEVMSAAYSVSLFTAWRGGPVDQVWLKQRVGQEGPRIAPSRWLGATLADRPRHPVPGMPAEHTTQQQGVPGPWHARLPHFRLEFTPSNGDELQSEYFVARHDAVAAYEALDRIKERIAPLLQIGEIRTVAGDDLWLSPAQGTDAVAFHFTWVPDTAAVLPVLGAIEEALAPFGARPHWGKVFTTPSSTLRGLYRHYADFERLTARLDPTGTFRNAFLQQHFPRAADGPDAERTG

SEQ ID NO: 128 - protein, 413 aa, Streptomyces sp.
MPTNWAGNLTFSAARVHRPADLAELRAVVAAGRRVKALGSGHSFSDIADTEGELVELSALPAEIDLDSAAGTVRVAAAVRYAELARVLHAHGRALPNMASLPHISVAGSVATGTHGSGDANGGLATSVRALDLVTADGDTRTFSHDSDGDTFDGAVVSLGALGVVTHLTLATVPAFQLRQRVRTGLELSDATEHFDAITGAAYSVSLFTDWRAPRFGQVWLKQLADAPEADLPWTRPADGPLHPVPGADPVHCTPQDGRAGPWHERLPHFRAGFTPSSGEELQSEYLLPRTNAVAALHALAELRATVAPVLQICEIRTVAADRLWLSPAHGRDTVALHFTWIKDPAAVAPVLTAVEAALAPLDPRPHWGKLFRTDPARIRAAYPRMADFLALAERTDPAGTFRNDYLRRLTST

SEQ ID NO: 129 - protein, 416 aa, Streptomyces sp.
MTVAATNWAGNITFRAERFHEPRSVAELRRIVAGARSVRVLGTGHSFNAIADTTGDLVSVAGLPRVVEPDERAGTVTVSAGMRFGEVAGVLDRVGLALHNLGSLPHISVAGACATGTHGSGSANGCLATAVRAVELVTADGALVTIERGAAEFPGSVVALGALGVVTRLTLDVVPAFEVRQWVYEGLPTAVLRERFDEIMAAAYSVSLFTGWRTDRIDQVWLKQRGGPDAPGAWLGAVLADGPRHPVPGCPPEPCTGQLGVPGRWHTRLPHFRPDFTPSSGDELQSEYFVARTDAVAAFDALDAVRERIAPALQIGEIRTVAADALWLSPAYQRDCVAFHFTWHPDPVAVADAVEAVEQALSAFAARPHWGKVFRTAPEAIRESYPRWEDFRRLLEEFDPAGRFRNGFLARHFPAG

SEQ ID NO: 130 - protein, 414 aa, Micromonospora endolithica
MTPRRNWAGNVHYAARRFHQPASFDELRRLVAGSDRLRVVGSGHSFNRLGDTTGDLVSLAGLPTAIALDRDAATVTVPGALRYGDLATHLHERGYALANLASLPHISVAGAVATGTHGSGERLGNLGAAVAGLELVTADGDLLTLDRRTEPETLAGAVVSLGALGVVTRVTLDVVPTFALRQYVHLGLPRESLDAALSSAYSVSVFTDWRTPTLREVWRKQRAEEPPPAADWLGTTAADHPRHPVAGMPPEHCTPQLGEPGPWHERLPHFRLGFTPSSGEELQSEYLVPRSAAADVLAALDPVAHLIAPVLQVCELRTVAADRLWLSPAYDRDSLAVHFTWIADADRVRPVLAAVEQRLAPFAPRPHWGKVFDIVPAAVAATYPRYADFRALAARLDPAGVFRTDLLDRYLPRD

SEQ ID NO: 131 - protein, 530 aa, Streptomyces sp.
MNPPVTVASPQTGRIRRSRGLTDAPSLGARYPHTCHFAGVLVKFRTRATALTSSRSESDHKALWVAVGIWAVPSPDCVRTCNHLVRSPPRLGDLAGRRRRPATSERGRAVTPAEKNWAGNITFGARRLRTPGSEAELQEIVAAGTRVRALGTRHSFSTVADTAGDLVSVAGLPRTVDIDREAGTVTVSAGLRFGEFAEELQQNGFALHNLGSLPHISVAGACATGTHGSGVGNTSLAGAVRALDMVTADGTTARLTRGDADFPGAVVALGALGVVTRLTLDLVPAFDVRQWVYEDLPQARIGDRAGFDEVMSAAYSVSLFTAWRGGPVNQVWLKQRVGADGPAEAPAEWLGARLADGPRHPIQGMPAENCTRQQGVPGAWHKRLPHFRLEFTPSNGDELQSEYFVARSDAAAAFAALDRLRDRIAPLLQISEIRTVARDDLWLSPASGTDSVAFHFTWVQDIAAVTPVLGAIEEALAPFGARPHWGKVFTTAPETLRTLYPQYADFEKLMARFDPAGKFRNDFLDRHFPQ

SEQ ID NO: 132 - protein, 439 aa, Streptomyces sp.
MIDHSAHAPSAVGQNWARNITFAARRLHTPASVAELQEIVAAGSAIRALGTGHSFNTVADTEGELVSVAGLPRVVEVDPSARTATVSAGLRFGEFTGELHRNGLALHNLGSLPHISVAGACATGTHGSGVTNRALAGAVRAMEIVTADGTLAKVGRGDADFPGAVVSLGALGVVTRLTLDLVPAFEIRQWVYEGLPQDQLLGRFDEVMSEAYSVSLFTSWRDDPIDQVWLKRRTGLSGPGTAPRRWLGATLAEGPRHPVPGMPARHCTEQEGTPGPWHARLPHFRLEFTPSNGDELQSEYFVDRSDAAAAYQALDGIREQIAPLLQIGEIRTVAADDLWLSPAQGRDSVAFHFTWVPDGAAVAPVVAAVEEALAPFAARPHWGKVFTTPPGTLRGLYEHYADFERLTERWDPTGTFRNDFLARHFPRTAGGAEEDGTAG

SEQ ID NO: 133 - protein, 412 aa, Micromonospora sp.
MPRRNWAGNVRYSARRFHRPTDVDQLRRLVAGAERVRVVGTGHSFNRFGDTPGDLVSLAGLPPEISIDPERRQVTVTAALRYGDVATRLHAEGYALANLASLPHISVAGAIATGTHGSGERNGNLGTSVAALEFVTADGDLRRVDRDADGEVFAGMVVGLGALGVVTRVTLDLLPTFEVRQYVRLDLPREHVAEALGSAYSVSLFTDWRTPRINQVWRKQRAGEPAPPPDWLGTTPADAPQHPVPGMPTRNCTPQLGVPGPWHERLPHFRLGFTPSSGDELQSEYHVPRSAAAEVLAALDPIAHLIAPVLQICELRTVAADRLWLSPNHHRDSLAVHFTWVDDPAVVLPVVAAVEERLAPWHPRPHWGKVFGLDPSRVAAAYPRYADFAALLTRLDPRGVFRTELLDRYFPR

SEQ ID NO: 134 - protein, 428 aa, Streptomyces griseus
MIDHSGRASSVRRTNWAGNISFGARRLHTPASVAELQDIVAAAGTVRALGTGHSFNTIADTTGDLVSVAGLPRSIEIDREAATATVSAGLRFGELTDTLHRSGFALHNLGSLPHISVAGACATGTHGSGVGNRSLAGAVRALELVTADGDVVTRQRGDQDFAGAVVSLGALGVVTRVTLDLVPAFDVQQWVYEGLPRDEVIGRFDAVMSEAYSVSLFTGWRGDPVDQVWLKRRLTGDGPLVAPRRWRGATLAGGPRHPVPGMPAGHCTQQGDAGPWHARLPHFRLEFTPSNGEELQSEYFVARSDAVAAYEALERIRGSFAPLLQIGEIRTVAADDLWLSPAQGGDAVAFHFTWVPDTAAVTPVLRKIEEALAPFGARPHWGKVFTTEPGRLRELYRYYADFEELMTRFDPTGTFRNDFLAHHFPLAG

SEQ ID NO: 135 - protein, 402 aa, Streptomyces sp.
MCVPRSIRELRETVAASDAVRPLGTRHSFNTVADTSGDHLSLTGLPRVADIDVACRTLSLTAGLAYGEFAAELQERGLALANLGSLPHISVAGAVATGTHGSGVGNRSLAAAVRSLTLVTADGGMRTLWRYDDDFPGAVVSLGALGVVTSLDLELVPAFEVRQWVYEELPEATLTARFDEVMSAAYSVSVFTDWRPGPVGQVWLKQRVGDEGTTAAMPAEWLGARLADGPRHPIPGVPAGNCTAQQGVPGPWHERLPHFRMEFTPSNGDELQSEYFVARADAVAAYEALARLRDRITPVLQISELRTVAADDLWLSPAHGRDSVAFHFTWVPDAAAVAPVAAAIEEALAPFGARPHWGKVFSTDPEVLRTLYPRYADFEALTRRYDPEGTFRNAFLDRYFRR

SEQ ID NO: 136 - protein, 421 aa, Streptomyces sp.
MTPAEKNWAGNITFGARRLRTPSSEAELQEIVATGTKVRALGTRHSFSTVADTAGDLVSVAGLPRTVDIDREAGTVTVSAGLRFGEFADELHQHGFALHNLGSLPHISVAGACATGTHGSGVANTSLAGAVRALDMVTADGTTARLTRGDADFPGAVVALGALGVVTRLTLDLVPAFDVRQWVYEDLPQARIGDRSGFDEVMSAAYSVSLFTDWRGGPVNQVWLKQRVDADVAAEAPAEWLGARLADGPRHPIQGMPAENCTRQQGVPGAWHKRLPHFRLEFTPSNGDELQSEYFVARSDAAAAFAALDRLRDRIAPLLQIGEIRTVARDDLWLSPAGGTDAVAFHFTWVQDIAAVTPVLGAIEEALAPFGARPHWGKVFTTAPETLRTLYPQHAGFEKLMARSDPAGKFRNDFLDRHFPQ

SEQ ID NO: 137 - protein, 411 aa, Micromonospora yangpuensis
MRRRNWAGNVHYAAARFHRPTSRDELRRLVAGSARLRAAGSGHSFNRLGDTTGDLVSLAGLPAAVRIDADRRTVAVAGGVRYGDLATVLHAQGYALASMASLPHISVAGSIATATHGSGAANGNLATAVAGLELVTADGDLLRVGRGDEDFAGMVVGLGALGVVTEVTLDVVPTFEMRQYVHLDLPREALDAALDSAYSVSVFTDWRGPRFMQVWRKQLADQPAPAADWLGARPAEVPQHPVPGMPAQSCTAQFGEPGPWHERLPHFRLGFNPSNGDELQSEYHLPRSAAAGALAALDPVADRLAAVVQTCEVRTIAADRLWLSPQYDRDSVALHFTWIADPAAVLPVVAEVERRLAPFAPRPHWGKVFDVDPSALAATYPRWDDFAALLTRLDPAGTFRTEALDRYFPRG

SEQ ID NO: 138 - protein, 423 aa, Streptomyces sp.
MPANWAGNIVFHAARLRTPATVDELRETVAASGSLRVLGSGHSFNTIADTTGDQVSVAALPACVDIDPAARTATVSGGLRFASFTGALHRAGLALHNLGSLPHISLAGAFATGTHGSGAGNGSLATAVRAVELVTADGALRTFERGDEDFPGTVVALGSLGVVTRATLDLVPAFDVRQWVYEGLPHAVLAERFDEILTSAYSVSVFTRWQGDAADQVWLKQRVGDPGPGADGAAPPVWHGARLAEAPRHPVPGVDPVHCTVQGGDAGPWHERLPHFRAEFTPSKGDELQSEYFVSREDGPAAFEALRAVADRIAPVLLVSEIRTVAATDLWLDPAHGRDSVAFHFTWVQDIDAVTPVLDAMEEALAPFAARPHWGKVFRTGGDRLRELYPRYEDFRALAGRLDPAGTFRNDYTRRLFDEGPAV

SEQ ID NO: 139 - protein, 451 aa, Micromonospora rhizosphaerae
MTDTPAHAVAAPNADGGRIAQRVPSGGAARAESGGARVAGGDASRNWAGNVRYRARRRHEPSTMDELRRLVAGSDRIRAVGSGHSFNRLGDTTGDLVSLAGLPPTVELDPERATVTVAAGLSYGEVATRLHSQGYALANLASLPHISVAGAVATATHGSGDANGNLATAVAALELVTADGELLTVDRSDDRFAGMVVNLGALGVVTRVTLDVVPAFDVRQYVRLGLPRDALGAAFASAYSVSAFTDWRSSRLEVWRKQQADQPPPPARWFGTTAARADRHPVPGMPAENCSPQLGVPGPWHERLPHFRLRFTPSSGDELQSEYHLPREVAAAALAALDPVADRIAAVVQVCELRTVAADELWLSPNYRRDTLAMHFTWIGDEAAVTPVVAEAEQRLAPFAPRPHWGKVFGSSPGAVAAAWPRQADFLALLTDLDPTGKFRTELLDRYFPRR

SEQ ID NO: 140 - protein, 436 aa, Streptomyces sp.
MPHASGHPVAPDDTAIPPVVRNWAGNITFNAARVHTPPSMERLREIVAGSSSVRVLGSGHSFNTIADTHGDLISVAGLPRTVEVDTTAATVTVGAGLRFAEFTGAVHRAGLALHNLGSLPHISVAGACATGTHGSGTGNGNLASAVRALELVTADGELLTLARGDEDFAGAVVALGAAGVVTRMTLDLVPGHDFRQWVYEGLPYARLRERFDDVLSAAYSVSLFTSWRTDQVDQVWLKQRIGDGDPDPAPETWLGAVLADGPRHPVPGMDAGTCTVQSGVPGPWHERLPHFRPEFTPSNGDELQSEYFVAREDGLAAFDALTAIGERIAPLLQIGEIRTVAADDLWLSPAYGRDSVAFHFTWHPDEAALTPVLAAIEEALAPFDARPHWGKVFTMGPEQVSGLYERYTDFEALTAKLDPRGVFRNDLIERYFPGGR

SEQ ID NO: 141 - protein, 425 aa, Streptomyces sp.
MQTSGARAHNWAGNITFGAARLHRPRSLDELRHIVAGAQRAHVLGSGHSFNRIADTEGDLLRVDGLPRRVEIDETRGVVTLSAGLRYGELATELHAAGFALANLASLPHISVAGSVATGTHGSGNERRGLASAVTAMEFVGADGETFSLSRESDPGRFPGAVVHLGALGVVTALTLEVEPAFEVAQWVYPGVPVGTVAAGYPEISASAYSVSVFTDWHSDTATVLLKRRLDREAAGHPGESWLGGRLAAGPWHPIPGMPATYCTEQGGVPGPWHERLPHFRPEFTPSGGEELQSELFLPRTSAGEAVGLLREMAGDFAGVLQVSEIRTIAAEDLWLSPAEGRDSMAFHFTWVRDMEAVLPVLAAVEARLLPLGARPHWGKVTTATPATVAERFPRLADFRRLADSLDPEGCFRNAFLDGLLAAAP

SEQ ID NO: 142 - protein, 417 aa, Streptomyces sp.
MATTPLTNWAGNVAFSAERLGIPESISELRAAVAGAGRVRVLGTGHSFSDIADTPDTLISLRHLPETFEVTGPGTVRVAAGITLADLAVQLHRSGLALHNLPSLPHISLAGACATATHGSGDGNGSLAGAVRSMEVVAADGSLTTVSRGDAAFDGAVVALGALGVVTHLELDVVPAFDVEQRVYEGLPWPVLTDRLDEVFAAAYSVSVFTDWRSRGGDSVALWVKHRVGDPAADLAWTGARPAEGPRHPIPAMPPENCTQQLGVPGPWHERLPHFRAEFTPSAGEELQSEFFVPRHEARNALLALDGLRARIAPVLQISELRSIAADPYWLSPHYQRPNIAFHFTWIPDADAVRPVVRRIEEALAPWDVRPHWGKVFTLPPAALAASYPRWSAFRRLMRDSDPLSTFQNPFLEGLFG

SEQ ID NO: 143 - protein, 419 aa, Streptomyces roseolus
MSDTTTNWAGNITFGAERLRVPASVEELQELVAGSRAVRALGTGHSFNAIADTTGDLVSTAGLPRVLDIDGRARTVTVSGGTRFGEVTGRLHEAGLALHNLGSLPHISVAGACATGTHGSGDGNGTLASAVRAVTYVSASGETVTTERGDEHFEGSVVALGALGVVTTLTLDLVPAFDVRQWVYENLPVTALRGAFDEVMSAAYSVSLFTRWRGDLIDQVWLKRRADDPGAADEPSRWLGAVRADGPRHPVPGMPADSCTPQLGLPGPSPFRLPHFRLEHTPSSGDELQSEYFVAREDAVAAFDALHAVRDAFAPHLQVGEIRSVAADGLWLSPAHRRDSVAFHFTWLPDTAAVTKALHVIEDALAPFAARPHWGKLFVTGPDALRGLYPSYDRFERLTADADPGGVFRNDFLARCFPR

SEQ ID NO: 144 - protein, 412 aa, Micromonospora sp.
MPRRNWAGNVRYSARAFHRPTSTDELRRLVAGSDRIRAVGTGHSFNRFGDTDGDLVTLAGLPPRIEVDPERGRVTVAGALRYGDVARHLHTQGYALANLASLPHISVAGAVATATHGSGQTHGNLATSVAALELVTADGELLRVDRDTDGDTFAGMVVGLGALGLVTRVTLDVVPTFELRQYVRLDLAREALDEALGSAYSVSVFTDWRTPRLREVWRKQVVDQPPPEADWLGTTAANEPRHPVLGMPAENCTPQLGAPGPWHERLPHFKLGFTPSSGDELQSEYHLPRSAAIEALAALDDVAHLIAEVLQVCELRTVAADELWLSPNHRRDSFVVHFTWIDDATAVLPVLAAVEERLAPFAPRPHWGKVFVTDPAELAARYPRYDDATALLTHLDPTGKFRTDLLDRYFPR

SEQ ID NO: 145 - protein, 421 aa, Micromonospora sp.
MTEPAATTPAPPPVAGRNWAGNVHYSARARHRPTTLDEVRRLVARAERVRAVGTGHSFNRLGDTTGDLISLAGLPPTGTLDRDRGTVTVPAGLRYGDLATRLHTDGYAVANLASLPHISVAGAVATATHGSGRANGNLATGVAGLELVTADGELLTVDRTDPRFAGMVVNLGALGVVTRLTLDVVPTFAIRQYVRLGLPRHALDAALDGAYSASVFTDWRSDRLDQVWLKRHADEPAPPADWLGTRAADAPVHPVPGMPPENCTIQLGEAGPWHERLPHFRLGFTPSSGDELQSEWHVGRADAAAALAALEPAAGRIAAVLQICEIRTIAADDLWLSPNYERDSVALHFTWIGDPAAVAPVLTEVEERLAPFAPRPHWGKLFDRDPATGYPRFDDFRALLREFDPAGKFRTDELDRYFARD

SEQ ID NO: 146 - protein, 424 aa, Streptomyces sp.
MAAYDGGTVTNWAGNITFTPHEVHRPGSLHELRELVARSRKVRVLGSGHSFNRIADSEDVLLSLAALPPSVEVDTAARTVRVAGGVRYAELARRVHEHGLALHNMASLPHISVAGSVATGTHGSGNANGSLAAAVREVELVTADGSTVTLRRGEDRFGGAVVALGALGVVTALTLDLVPGFEVSQRVYRDLPLDGLDFAAVSSAAYSVSLFTDWRGPRFTQVWLKQRADAPAPDFPWAAPATEPMHPVPGMPAVNCTQQFGVPGPWHERLPHFRAEFMPSSGAELQSEYLLDRSDALAALHALDSVRDTIAPVLQICEVRTVAADDQWLSPAYGRDTVALHFTWVKDTASVLPVVSLVEDRLAPFAPRPHWGKVFTTSPAVLRKLYPRMSEFVGLAETLDPEGTFRNPFVRQVLAGRAERPEQI

SEQ ID NO: 147 - protein, 694 aa, Micromonospora sp.
MRTLTTIARTGEGRGTAAEPRLTRTTRGLRAGGRGAAGGAPGGSVAAQPRRGRRHRAGRRGAARRVPAVPVRYRRGGADRTAAGAAPGDQLAGDRRARARRTTARRGQPRLAPAAAGAHSQPAARRADERPPPGGRPARGGAARPGSGAGAAGRDLCGADPVRRRPLHRLAAAAPCRLHRAGARDRAARLPDGPGRQAPPGRPGGPGLGRGAGAAGRPRRSRAGPGGRVDHRHARLQHDRRRRGAARARHSPRRGPLDRPGDHLVTSADELTEPAPAGARADVPRRNWAGNVRYSARRFHRPADVDQLRRLVAAAERVRVVGTGHSFNRFGDTPGDLVSLAGLPPEISIDPERRQVTVTAALRYGDVATRLHAEGYALANLASLPHISVAGAIATGTHGSGERNGNLGTSVAALEFVTADGDLRRVDRDADGEVFAGMVVGLGALGVVTRVTLDLLPTFEVRQYVRLDLPREHVAEALGSAYSVSLFTDWRTPRINQVWRKQRAGEPAPPLDWLGTTPADAPQHPVPGMPARNCTPQLGVPGPWHERLPHFRLGFTPSSGDELQSEYHVPRSAAAEVLAALDPIAHLIAPVLQICELRTVAADRLWLSPNHHRESLAVHFTWVDDPAVVLPVVAAVEERLAPWHPRPHWGKVFGLDPSRVAAAYPRYADFAALLTRLDPRGVFRTEELDKYFPR

SEQ ID NO: 148 - protein, 532 aa, Streptomyces sp.
MPHEPPSHSCISTNRTHPPIPWTDGCALARCTISTHVPFRWSSREVQNASCRFGLVPFRAGSQGLVVGCWHLGGSALGLCADVSPPRTVASASGRLGRRRRWPATSERGRAVTPAEKNWAGNITFGARRLRTPSSEAELQEIVATGTKVRALGTRHSFSTVADTAGDLVSVAGLPRTVDIDREAGTVTVSAGLRFGEFADELHQHGFALHNLGSLPHISVAGACATGTHGSGVANTSLAGAVRALDMVTADGTTARLTRGDADFPGAVVALGALGVVTRLTLDLVPAFDVRQWVYEDLPQARIGDRSGFDEVMSAAYSVSLFTDWRGGPVNQVWLKQRVDADVAAEAPAEWLGARLADGPRHPIQGMPAENCTRQQGVPGAWHKRLPHFRLEFTPSNGDELQSEYFVARSDAAAAFAALDRLRDRIAPLLQIGEIRTVARDDLWLSPAGGTDAVAFHFTWVQDIAAVTPVLGAIEEALAPFGARPHWGKVFTTAPETLRTLYPQHAGFEKLMARSDPAGKFRNDFLDRHFPQ

SEQ ID NO: 149 - protein, 423 aa, Streptomyces sp.
MPTSAAPMNWAGNITFGAARVHHPASVAELRRIVGSAERVRALGTGHSFNRIADTSGDLIRLDRLPHRVEIDPDGSRVTVAAGMRYAQVAEALQAAGYALANLASLPHITVAGACATGTHGSGNAQRSLAAAVAGLEIVGPEGDLTRLSREADGDRLAGAVVSLGGLGIVTGVTLDIEPTYEVAQWVYDGLPLDRLADRFDEVSGAAYSVSVFTDWHSGDGVVWRKCRADRPGPPRPDQPWLGARPADGPRHPVPGMPPAHCTQQAGVPGPWHERLPHFRPDFTPSSGEELQSELILPRDAAPEAFAALRRLGSRIAPVVLVSEVRTIAADDLWLSPAYGRDSVALHFTWAPDRAAVLKVVAAMEEELLPLGARPHWGKLTAAAPGDVVAGYERAADFGRLLHEYDPAGKFRNPYLDRLFPVG

SEQ ID NO: 150 - protein, 420 aa, Streptomyces sp.
MTNWAGNVTFGAARLHTPSSVEQVQEIVAGSTGVRALGSGHSFNTIADTTGDLVSVAGLPRTVEVDSDARTVTVSGGLRFAEFTDAVHDAGLALHNLGSLPHISVAGACATGTHGSGIGNGSLATAVRALDLVTADGSLLSLARGDQDFAGSVVALGSAGIVTRMTLDLVPAYEIRQWVYEGLAHTELSDHFDAVLSAAYSVSVFTRWRAGDPDKVWLKQRVGDAAASPAPDEWLGAVPADGPRHPVPGMDPLTCTEQQGVAGPWHTRLPHFRAGFTPSSGEELQSEYFVAREDGPAAYEALSAIADRIAPVLQIGEIRTIAGDDLWMSPAHGRDSVAFHFTWFPDTAAVTPVLIAMEEALAPFGVRPHWGKLFTTPAERLRELYPRYDDFEALMARLDPRGVFRNALMERFFPGGHARG

SEQ ID NO: 151 - protein, 428 aa, Streptomyces sp.
MHTPGAPARNWAGNTVFSAQRVHRPSSVEELQHIVGSARWVRALGSGHSFNRIADTGGDLVRLDGLPPVAEVDEQSGTVTVSAGMRYGQLATFLHEAGSALANLASLPHISVAGCCATATHGSGDNEKCLAAAVTALELVGPDGELAEFSRRSDPGRFPGMVVALGALGVVTRLTLSVEPTFEVSQHIFTGVPLVELATGFDQIFGCAYSVSAFTDYRSGTARVWVKRRTAERDGETRRRADWEGRTPADAAHHPIPGIPPTHCTEQLRVPGPWHERLPHFRPDFTPSNGEELQSEVLLPRAAAPEALTALQELGPRIAPVLQISEVRTVAADDLWLSPAYERDCVAFHFTWIKDTAKVLPAVAAVEERLMPLGARPHWGKLTAVPAERIAGLYERAEDFRDLLHERDPRGVFANPFVEQVFAPSYED

SEQ ID NO: 152 - protein, 426 aa, Streptomyces sp.
MPTPASGSPAHNWAGNTVFTARRVRRPQSVEELQHIVASSHRVRALGSGHSFNRVADTSGDLVRLDGLPPAVDVDEASSTVTVGAGMRYGEVAGVLHEAGHALANLASLPHISVAGCCATATHGSGDSEKCLAAAVTSVEIVGPDGELSLLSRQDEPRRFPGAVVALGALGIVTRLTLRVEPSFDVSQHIYTGVSLTELAARFDEIFGCAYSVSAFTDYLSGEARVWVKRRTTERDGGVRPPGWEGETPADAAHHPIPGIPATHCTEQLGVPGPWFERLPHFRPDFTPSNGEELQSELLLPRAATQEALAALRALGDRVAPVLQISEMRTVAADDLWLSPAWERDCVAFHFTWVKDTEAVLPVVAAVEEKLLPLGARPHWGKLTAMEPERIAALYERAGDFRRLVLERDPERVFANAFVDRVFALG

SEQ ID NO: 153 - protein, 420 aa, Streptomyces scopuliridis
MPPVMRNWAGNITFNAARVHTPSSVERLREIVAGSGSVRALGSGHSFNTIADTHGDLVSVAGLPRIVEIDEAAATVTVSAGLRFAEFTGALHRAGLALHNLGSLPHISVAGACATGTHGSGAGNGTLASTVRAIELVTADGELLVLDRDDEDFAGAVLALGAAGIATRMTLDLVPAYDIRQWVYEGLPYERLRERFDEVLSAAYSVSLFTSWRTDRIEQLWLKQRVGDGDPAPDSRFGAVRADGPRHPVPGMDASTCTEQSGVPGPWHERLPHFRPEFTPSSGEELQSEYFVAREDGRAAFDALARIRERIAPVLQIGEIRTVAADGLWLSPAYGRDTVAFHFTWHPDTAAVTPVLDAIEEALAPFEVRPHWGKLFTMGPERVAALYERYADFEALTAKLDPRGVFRNDLLERYFPGGRG

SEQ ID NO: 154 - protein, 414 aa, Micromonospora sp.
MDTPAARNWAGNVRYSARRRHRPATVDELRRLVAGSDRIRAVGTGHSFNRLGDTTGDLVSLAGLPPTVDLDPERGTVTVAAGLRYGDVATRLHGDGYALANLASLPHISVAGAVATGTHGSGDAHGNLATAVAALELVTADGDLLTVDRADERFAGMVVSLGALGVVTRVTLDVVPTFDVRQYVRLDLPGDALDAAFASAYSVSAFTGWRTGRIDQVWRKQRADQPPPPADWLGTRSAPAQRHPVPGMPAENCTPQLGVPGPWHERLPHFRLGFTPSSGDELQSEYHVAREVAGDALAALDAVADRIAAVLQVCELRTVAADGLWLSPNHGRDSLAIHFTWIGDEVAVRPVVAAVEERLAPFAPRPHWGKVFGLDPASVAAAYPRYADFRALLAELDPAGKFRTELLDRHFPRS

SEQ ID NO: 155 - protein, 428 aa, Streptomyces sp.
MSSSGHATGLPAHNWAGNTVFTATGVRRPASVEELQHIVASSRRVRALGSGHSFNRVADTAGELVRLDALPPLVEMDEAASAVTVGAGMRYGEVATVLHESGHALANLASLPHISVAGCCATATHGSGDAERCLAAAVTSLELVGPDGELTTLSRESDPERFPGAVVALGALGIVTRLTLRVEPDFEVSQHIYTGVPLTEVADRFDEIFGCAYSVSAFTDYLGGDARVWLKRRTAERPGTRARTRWEGVTPAGAGHHPIPGIPATHCTRQLGVPGPWHERLPHFRPDFTPSNGDEVQSELLLPRASAPEALEALCALGQRIAPVLQISEIRTVAADDLWLSPFFQRDCVAFHFTWVKDQDAVLPVIAALEERLLPLGARPHWGKLTAMEPESVAALYRRAGDFRELVREHDPDGVFANPFVDRAFALR

SEQ ID NO: 156 - protein, 411 aa, Micromonospora mirobrigensis
MATRNWAGNITYAAARRHRPSSVDELRRLVAASDRLRVVGTGHSFNRFGDTTGDLVSLVGLPDTVEIDRDRGAVTVSGAIRYGDLATRLHAQGLALANLASLPHISVAGAVATGTHGSGDGNRNLAAAVAGLELVTADGDLLTVDRADDRFAGMVVALGALGAVTRVTLDVVPAFDIRQYVHRELPAAALDEAFGSAYSVSAFTWWRSDRIDLLWRKQRADQAPPPADWLGATAAREPVHPVRGMPAEHATAQLGEPGPWHERLPHFRLGFTPSAGDELQSEYHLPRAALADAFATLADIRDRLAPVTQVCELRTVAADELWLSPNHDRDTVAVHFTWIADEAAVAPVLAEVERRLAPFAPRPHWGKVFTLDPTEVAAVHPRHGDFLTLLRDLDPAGTFRTAQLDRYFPRD

SEQ ID NO: 157 - protein, 550 aa, Streptomyces sp.
MAGPSTNRQAAGANRAETGPEANRAGTGPDSNPAGAGSDSNRTGTAPNTIPAGAGPTTDPTATGPDITPARTAAPDTNQTDPGPTTTRTGTRPNTNPTATAPDTTPAPTAPDTNRIDAAPDTNRTDAAPTTTPPPTAPVTNWAGNIRFRASRRAAPGCVDDVRELVAASRTVRVLGTGHSFNDLADTTGLLLATSALPKSVEIDARAGTVTVGAGVRFGELTGVLHASGHALHNLGSLPHISVAGACATGTHGAGVGNPSLAAAVRALELVTADGELLTLDRSDERFPGSVVALGALGVVTRVTLGLVPAFDVRQWVYEGLPTAALRDGLDEVLSAAYSVSLFTRWRGERVEQVWLKQRVDGAAPVCLPGARLADGPRHPVPGMAPEACTPQGGVPGPWHTRLPHFRLEHIPSSGAETQSEYFVARSDASAAFAALDRVREEFAPVLRIGEVRAVAADDLWLSPAHRRDSVAFHFTWLPDAPAVAQALHHVERALAPFAPRPHWGKVFVTPPETLRERYEHHDRFRRLMTALDPAGKFRNDFLRRHFPEA

SEQ ID NO: 158 - protein, 432 aa, Streptomyces sp.
MSGTTTEAGRTNWAGNVTFGAARVARPDTVDELRRTVAESDAVRVLGTGHSFNRIADTAGTLVSLADLPPSCETDRERSTVTVSAGMRYAQVAELLQAEGLALANLASLPHISVAGAVATATHGSGVGNRGLASSVAGLELVGPGGDLVQLDRGSADFAGAVVHLGALGVLSAVTLDVEPTYRIAQHVLTGLPLEALAQGDADEVAAMLAAAYSVSVFTDWHAPRAQLWLKHRVDAGAAAPRLDWFGAVPADQPQHPIPGVPGTHCTEQLGVPGPWHERLPHFRPDFTPSAGEELQSEFLLPRAAAQSAFAALRELGSRIAPVLQVSEIRTVAADDLWLSPAYGRDCVALHFTWHKAPEAVAPVLAAVESALTPLGARPHWGKLFTATPGAAADLYERASDFRELMDRQDPDGKFRNAFTLSVYAGEVRAER

SEQ ID NO: 159 - protein, 419 aa, Streptomyces sp.
MSGTITNWAGNITFGARRLAAPASVEELRELVAGSRAVRALGTRHSFNTIADTAGDLVSTARLPRVLDIDPRARAVTVSGGTRFGEMTGALHEAGFALHNLGSLPHISVAGACATGTHGSGDGNGTIASAVRAVTYVCAGGELVTTRRGDEDFAGSVVALGALGVVTELTLDLVPAFDVQQRVYEGLPLTALRENFDEVMSAAYSVSLFTRWQGGAIDQVWLKRRVEGSGPAAGADRWFGARRAGGPRHPVPGMAADACTPQGGLPGPSPLRLPHFRLEHTPSSGDELQSEYFVAREDAVAAFDALHAVRESFAPHLRVGEIRSVAGDDLWLSPAHRRDSVAFHFTWLPDPEGVGGALKVIEEALTPFAARPHWGKLFMTEPEALCGLYPEYGRFAELMKLRDPEGVFRNDFIGRLFAL

SEQ ID NO: 160 - protein, 426 aa, Micromonospora echinaurantiaca
MTRPDAPAAAERPADGVPRRNWAGNVHYAARRFHRPETMDELRRLVAGSDRIRAVGTGHSFNRLGDTGGDLVSLAGLPPSVRLDPQRRTVTVPAAMRYGDLATFLHEQGYALANLASLPHISVAGAVATGTHGSGPTNGNLATAVAGLELVTADGDLLTVDRASDSFAGMVVGLGALGVVTRLTLDVVPTFDLRQYVRLDLPREALDAAFDSAYSVSVFTDWRSPRLREVWRKQRADQPPPPADWLGTTAADRPRHPVPGMPAENCTAQLGEPGPWHERLPHFRLGFTPSSGEELQSEYHLPRAAAAEALAALDGVAHLIAPVLQVCELRTVAADDLWLSPNQGRDSLAVHFTWIADAAAVLPVVAAVEERLAPFAPRPHWGKVFGLAPDAVAATYPRYADFTALLRRLDPHAKFHTDLLARYFPR

SEQ ID NO: 161 - protein, 482 aa, Streptomyces atratus
MARISSRSALDQEVCGLLSAFGGFRAGGDVRTCHVLVLPHPHLGECPDGGERRPASERRRAVTSAEKNWAGNITFGARRLHAPRSVAEIQEIVASGTTVRALGTRHSFSTVADTAGDLVSLAGLDRVVEIDRAAGSVTVGAGLRFGEFADVLHENGYALHNLGSLPHISVAGACATGTHGSGIGNRSIAGAVRALEMVTADGGTAELKRGDADFPGAVVALGALGVVTRLTLDLVPAFDVQQWVYEDLPQSRLGDADGFDEVLSAAYSVSLFTDWRGGPVNQVWLKQRVDAGGARQAPAEWFGARLADGPRHPIHGMPAQNCTRQQGVPGAWHRRLPHFRLEFTPSNGDELQSEYFVARRDAAAAYAALGRIRDRIAPLLQIGEIRAVARDDLWLSPASGIDAVAFHFTWVPDTAAVTPVLGAIEEALAPFGARPHWGKVFTTAPDALRALYGQYADFEKLMARYDPAGTFRNDFLDRHFPR

SEQ ID NO: 162 - protein, 424 aa, Streptomyces sp.
MPATDTPLRNWAGNVTFGAARVHRPTSEAELSRTVASAEKVRVLGSGHSFNRIADTDGDLVLLDGLARRVRVSEDRATVSVSAGMRYAEVASALQERSLALANLASLPHISVAGSCATGTHGSGDSLRGLATAVTGIELIGPDGTRTTLDRASDPDRFPGAVVNLGALGVVVGMTLAVEPAFDVAQWVYDDVRLDRIAEDFDTVFGAAYSVSAFTDWRAETATVWLKRRTDRLPTGTPGDRWMGGLLADGPRHPVPGMPPSSCTEQLGVPGPWHERLPHFRPEFTPSNGEELQSELLLPREAAADAMAALRALGDRIAPVLLVSEIRTVAADDLWLSPSHGRASLALHFTWVRRPDDVLPVIGAIEERLLPLGARPHWGKLTTAAPRTVAALYERAPDFRRLRQELDPAGKFSNAFVTELVAGH

SEQ ID NO: 163 - protein, 429 aa, Streptomyces sp.
MLTTGATTNWAGNITFGAARLHRPATSGELRRIVGSADRVRVLGTGHSFNRIADTDGDLVSLERMPHRVDIAPDGSTATIAAGMRYAQVAEELHTAGYALANLASLPHITVAGACATATHGSGNVQRCLAASVAGLEIVGPEGDVTELRRDTETDRLSGAVVGLGGLGVVTSMTLDIEPAYEVAQWVWTGLPLDRLGDSFDEIFAAAYSVSVFTDWQSDEGVVWLKCRTDLPGPPEPGQPWLGARPADRHHHPVPAMPPLHCTEQLGAPGPWHERLPHFRPDFTPSNGDELQSELILPRTAATEAFAALRGLGGRIAPLVQVSEVRTVAADDLWLSPAYGRDCVALHFTWVPDHAAVIEVVAAMEELLLPLGARPHWGKLTTVTPERIVASYERAADFGRLLADHDPAGKFRNPFLDGFFPADSWRADR

SEQ ID NO: 164 - protein, 426 aa, Streptomyces hainanensis
MLTTGTPVRNWAGNITFGAERWHRPSTIDELRRIVATARQVRVLGAGHSFSDIADTTGDLVRLDGLPRRVEIDPESATVTVGGGLRYADFCAEVHAAGFALANLASLPHITVAGAVATGTHGSGNGVPGLASSVAAIELIGPEGDPVRLSRAEDPERFAGAVVNLGALGPVTALTLDLERGYDVAQWVYTDVPLDAVLAGFDEVTGAGHSVSTFTDWRSGLGTIWLKRRLDRDGAGHPGTEWLGGRLADAPRHPIPGQPPESCTPQLGAPGPWYDRLPHFRLEFFQGEGDELQSELFVPRAAVRDAFAALTGLGDRIAPLLHVSEVRTVAADELWLSPSQGRDSVGFHFTWHRRPEAVLDVVAAIEERLLPLGARPHWGKVTAAEPAVIAARYDRFADFRRLVLDHDPVGRFRNAYVARLLDAGPS

SEQ ID NO: 165 - protein, 421 aa, Micromonospora sp.
MPERNWAGNVRYAAARRHRPTGLDELRSLVAGSDRIRAVGTGHSFNRLGDTAGDLVSLAGLPQTVEVDRERATVTVAAAMRYGDLATRLHAAGFALPTMASLPHISVAGAVATATHGSGDGIGNLATAVSALELVTADGDLLTVRRDADGDRFAGMVVALGALGVVTRLTLDVVPAFEVRQYVRLGLPRAALDEAFASAYSVSLFTDWRGGADDPRGAAGRIGQVWRKQLADAPPPPADWLGTTAAAGPVHPVPGMPAQNCTAQLGEPGPWHERLPHFRLGFTPSSGDELQSEYHLPRAAAAGALAALDPLADRIAAVLQICELRTVAADELWLSPQYGRDSLAVHFTWIGDGDAVAPVLAEVERALAPFVPRPHWGKVFTLDPAAVAAAYPRFADFAALARELDPAGKFRTDLLDRYLPR

SEQ ID NO: 166 - protein, 424 aa, Streptomyces sp.
MSDGIPAVTNWAGNITFSAREVSSPGSLGALRELVAASRRVRVLGSGHSFNEIADTDGVLLSLAELPPEVDVDTAARAVRVSGWLRYAELARRVHAHGFALHNMASLPHISVAGSVATGTHGSGIANGSLASAVREVEMVAADGSTLTLRRGDDRFDGAVVSLGALGVVTALTLDLEPAYEVRQDVFTGLPLAELDFEAVASAAYSVSLFTDWRAPRFNQVWLKQRLDGARPGDAPAPDFPWAPPATEPQHPVPGMPAENCTPQLGSVGPWHERLPHFRAEFMPSSGAELQTEYLLPRGHARAALDALDGIRETLAPVLQICEVRTVAADRQWLSPAYGRDTVALHFTWVKDTAAVLPVVAALEESLAPFDARPHWGKVFTLTPETLGARYPRLGDFAALATDVDPSGTFRNPFLDRILPAPGA

SEQ ID NO: 167 - protein, 408 aa, Micromonospora sp.
MTGSNWAGNVTWSARARHEPSTLDELRRLVAGADRVRAVGTGHSFNRLGDTTGVQVSVAGLPPTVALDRDRGTVTVAAGMRYGDLATALHAEGYAVANLASLPHISVAGAVATATHGSGPAHGNLATAVAALELVTADGDLLTVDRADPRFAGLVVHLGALGVVTRLTLDVVPAFEVRQYVRLGLPREALDDALDAAYSVSVFTGWRSPRFDQVWLKQRADQPPPPADWLDTRAADTLHHPVPGMPAENCTDQLGVPGPWHERLPHFRLGFTPSSGDELQSEWHLARSDGAAALAALDPAAERIAAVLQVCELRTVAADGLWLSPNHERDSLAVHFTWVGDPVAVAPVLDEVEERLAPFAPRPHWGKLFARDPATAYPRHDDFRALLREFDPAGKFRTALLDRYFPRY

SEQ ID NO: 168 - protein, 425 aa, Streptomyces xiamenensis
MVTINAPARNWAGNVTFGARRTHRPATVGELRRIVAGSPQLRVLGSGHSFNLIADTPGDLVRVDGLPPRTEIDAERRRVTISAGMRYAEVTAALHAAGFALANLASLPHISIAGSCTTGTHGSGNSQPGLANAVTAVELIGPDGEIARLERDADPDVFPGAVVSLGALGVITAMELEIEPAFQAAQWVYENVPLDGIDTARFDEITGAAYSVSTFTRWDDGRGTVVLKRRLDRESGAHPGEDWQGGTLATAPWHPIPGAPTEHSTQQLGVPGPWHERLPHFRPDYSPSHGEELQSELFLPRSAAPAAFAVLRELGERMAPVLQVSEVRTIAADALWLSPSSGRETVAFHFTWTLETERVLPVLGEMEARLLPLGARPHWGKLTMMPPATVTASYPRFADFRRLVLSRDPAGVFRNPFVAALLGTD

SEQ ID NO: 169 - protein, 427 aa, Streptomyces sp.
MTQLEATTDLPRTNWAGNVSYDPGRVHRPRTLDELRRLVAERTRIRALGSGHSFSAVAEAPGDRVLLDGLPRTVRLDRQEATVTVAAGTRYADLAFGLQRAGLALANLASLPHISVAGSCATGTHGSGDGQRCLASSVAGLRLVGPEGDLVELRRDTDRDTFAGSVVALGALGVVTEVTLDVEPTYDMTQRVRVRAPLTEVAERFDDVFSAAYSVSVFTDWLGDGTQVWLKDRLDRGGNGKNGGWAGGEPARVPLNPVPGMPPEFSTEQLGTAGPWFERLPHFRPELTPGAGEEFQSEYYLPREAAPAAFAALRGIGHLLAPALHIAEVRTVRADDLWLSPAYGRDSVTFHFTWIKDAAAITPLIDAVEELLVPLGARPHWGKLTSLGASEIAAGYERAVEFGRLARKYDPEGKFSNGFLDALFPEG

SEQ ID NO: 170 - protein, 477 aa, Streptomyces sp.
MKNIRTDRPGHSRNSAKENSVPQTPGRPEVPVGQIPEAAAPVARNWAGNITFNAARVHAPTSVAELQDIVAGSDAVRVLGSGHSFNTIADTHGDLVSVAGLPAVVEVDEAARTVTVGAGLRFAEFTGAVHRAGLALHNLGSLPHISVAGACATGTHGSGTGNGTLASAVRALELVTADGELRRLERGDEDFAGSVTAFGAVGVVTRLTLDLVPAYEIRQWVYEGLPYGRLRERFDELMAAAYSVSLFTDFHSDRIGQVWLKRRADDGGPHSVPETWHGAVLADGPRHPVPGMDAGTCTEQAGVTGPWYERLPHFRAEYTPSNGDELQSEYFVARADGPAALDALTRIGDRIAPVLQVGEIRTIAADGLWLSPAYGRDTVAFHFTWIPDTAAVTPVLAVIEEALAPFRVRPHWGKLFAMGADRLGELYERYGDFEALTARRDPRGVFRNAWLDRYFPGGRDGSGGGSAGGGGPERRRR

SEQ ID NO: 171 - protein, 415 aa, Streptomyces sp.
MTVARTNWARNVAFSAERFHRPESVDELRRIVGSGRSIRALGTGHSFNTIADTEGDLVSVAGLPRVIDIDERASAVTLSAGLRFGEVTAAVDRAGFAFHNLGSLPHISIAGACATGTHGSGVTNGSIAAAVRSVELVLADGTLQTISRGDTGFAGSVVALGALGVVTRLTLDLVPTFGLRQWVYENLPAALLRESFDEVLAAAYSVSLFTDWRDDRINQVWLKSSGTETAPATWLGATLADGPRHPVPGLEPEPCTEQLGIRGPWHARLPHFRPDFTPSSGDELQSEYFVHRADAPAAFDALDAVREKISPALQISEIRTVAGDDLWLSPAFERDCVAFHFTWHPEPTAVREAVRAVEAALEPFGARPHWGKVYSTAPEAIRALYPRFGSFEELMATSDPAGKFRNGYVDRLFPR

SEQ ID NO: 172 - protein, 419 aa, Streptomyces glauciniger
MPAESNWGGNVAFTARRLHHPESVAELQEIVARAPRVRALGTRHSFSTVADTDGEHVSTSRLPAVIDVDRTERTATVGSGLRFGEIVRAIDEAGLALHNLGSLPHISVAGACATGTHGSGTGRRSLAGAVRGMTMVTADGELAEIRRGEADFDGSVVALGALGVVTRLTLDLVPAFAVRQTVYEDMPREEFRENFDAVMSAGYSVSGFTRWRERAVDQVWLKERVEADGAEPAPRTWFGATAADGPRHPIPGMPGTHCTPQQGLVGPWYARLPHFRLEFTPSSGEEIQSEFFVDRRDAVAAFDALWQVRERFSSEVLIGEIRTVAADSLWLSPAYGRDSVAFHFTWAPDAEAVARAVRVVEEALRPFSARPHWGKLFTAPSPDALRELYPRYDDFRALAARFDPSGVFRNAFMREHFPD

SEQ ID NO: 173 - protein, 392 aa, Streptomyces sp.
MDDVRELVAASRTVRVLGTGHSFNDLADTTGLLLATSALPKSVEIDARAGTVTVGAGVRFGELTGVLHASGHALHNLGSLPHISVAGACATGTHGAGVGNPSLAAAVRALELVTADGELLTLDRSDERFPGSVVALGALGVVTRVTLGLVPAFDVRQWVYEGLPTAALRDGLDEVLSAAYSVSLFTRWRGERVEQVWLKQRVDGAAPVCLPGARLADGPRHPVPGMAPEACTPQGGVPGPWHTRLPHFRLEHIPSSGAETQSEYFVARSDASAAFAALDRVREEFAPVLRIGEVRAVAADDLWLSPAHRRDSVAFHFTWLPDAPAVAQALHHVERALAPFAPRPHWGKVFVTPPETLRERYEHHDRFRRLMTALDPAGKFRNDFLRRHFPEA

SEQ ID NO: 174 - protein, 421 aa, Streptomyces aureoverticillatus
MSGTTSEPPVGSATNWAGNITFSAGKPHLPASLDELRGLVAGSRQVRVLGSGHSFNRIADTDPDGTLLSLAALPPSVDIDTRARTVRVAGGVRYAELARRIHAHGLALPNMASLPHISVAGSVATGTHGSGDANQPLSTAVSAVELITADGTSRTLRRGDDGFDGAVVALGALGVVTALTLDLVPGFEASQHVFTELPLAGLDFAAVTSAAYSVSLFTDWRGPRFTQVWLKQRAGRPVDFPWAPPATAPHHPVPGMPAANCTEQLGVPGPWHERLPHFRPEFTPSSGAELQSEYLLPREHALDALHALDALRATIAPVLQVCEVRTVAADSQWLSPAYDRDTVAFHFTWVPDAAAVLPVVSRVEERLAPFAPRPHWGKVFTTAPAELRSRYPRLGAFAALADSLDPSGKFRNSFVRGVLTG

SEQ ID NO: 175 - protein, 431 aa, Streptomyces sp.
MLTTGEPAQNWAGNIIFGAARVHRPTSLDALRRIVSAAAHVRVLGSGHSFNRIADTPGDLIRTDGMPRRVEIDPAGRTVTVSGGLTYGELAAELHAHGFALANLASLPHISVAGSVATGTHGSGDGQQGLASAVSRVELVGPGGEPAVLDRAADPDRFPGAAVSLGALGVVTALTLAIEPAFEVAQWLHVDVPLDAVADRFDEITGAAYSVSTFTDWHSGKATVWRKQRADREGPADRPADWLGGRPADAPWHPIPGMPAEFCTPQLGVPGPWHERLPHFRAEFTPSRGEELQSELFLPRPAATAAFAVLRDLAAELAPVLQVSEIRTVAGDDLWLSPAQGRDSVALHFTWVKDTARVLPALGAMEERLLPLGARPHWGKLTTASPADIAARFPHLPDFRRMVLDHDPAGQFRNDWVTGLLSAAEPSTAGR

SEQ ID NO: 176 - protein, 417 aa, Streptomyces beijiangensis
MVCRMLTNWAGNIAFTAQRLDSPATLDELRKSVTDSARVRVLGSGHSFNEIADSEGTLLSVAGLPPAVEVDRAASTVRVAAGVRYAELARQVHQHGFALHNMASLPHISVAGSVATGTHGSGNENGSLATAVRELDLITADGELLTLSREHDGERFNGAVVSLGALGVVTSLTLDLVPAFEMAQRVHTGLPLSVLDEHFDAVTSAAYSVSMFTDWRGPRFGQVWLKYEAGREPEFPWAPEAEGPLHPVPGVSPEHCTQQQGVPGPWHERLPHFRAEFTPSNGEELQSEYLVDRADAVAALHAVDSVREAVAPVLQICEVRTMAGDGLWLSPAYGRDTVGLHFTWVKDMEAVEPVLRLLEERLAPFAPRPHWGKVFTVPTTQLTDRYPRLAEFRSLARELDPAGKFTNAFLAPLLGEA

SEQ ID NO: 177 - protein, 448 aa, Micromonospora sp.
MARVPDRSRGYSDAPGRRGAGRPRRRPDRGDVSAVTDLPRRNWAGNVTYAARAFHRPSSPDELRRLVAGSDRIRAVGTGHSFNRLGDTTGDLVSLAGLPPTVEIDRERGTVTVAAALRYGDLATRLHAEGLALANLASLPHISVAGAVATGTHGSGVGNRNLAAAVAALELVTADGDLVTVDRDDPRFAGMVVSLGALGVVTRVTLDTTPTFDVRQYVHLDLPAEAIDAALASAYSVSGFTSWRSSRVDQVWRKQLADQPAPPADWLDATAAKEPVHPVPGMPARNCTAQLGEPGPWHERLPHFRLGFTPSSGDELQSEYHLPRAATAEALVALDGMRDRIAGVLQVCELRTVAADGLWLSPNHGRDSLAVHFTWIDDASAVLPVVTEVERRLAPFAPRPHWGKVFTLEPAAVAATFPRYADFRALLAEWDPAGKFRTEGLDHYLPRP

SEQ ID NO: 178 - protein, 413 aa, Streptomyces sp.
MLTNWAGNIAFTAQRIDRPTTLDGLRRLVARSARVRVLGSGHSFNTLADTDGTLVSVAGLPPEIEVDRAASTVRVAAGVRYAELAQELHAHGFALPNMASLPHISVAGSVATGTHGSGAALGSLATAVRELELVTADGELRTLGRDRDGERFAGSVVSLGALGAVTSLTLDLVPAFELAQRVRTGLPLSVLDEHFEAVTSAAYSVSLFTDWRGPRFGQVWLKYAAGHEPRFPWAPEATGPVHPVAGMPPVHCTEQQGVPGPWHERLPHFRAEFTPSSGEEIQSEYLVDRRHGLAALHAVDAVRDVLAPLLQVCEVRTMAADDLWLSPAYGRDTVGLHFTWVKDTAAVLPVLGLLEERLAPFAARPHWGKLSTVPAGRLAALYPRLADFRGLVGEFDPRSKFTNAFLAPLLGDV

SEQ ID NO: 179 - protein, 413 aa, Streptomyces guanduensis
MRTNWAGNLTFAAERVHRPASLDELRALVAGGRRVKALGSGHSFNGIADTEGDLVELSGLPADIDIDSDAATVRVAAGVRYAELAEELDAHGFALPNMASLPHISVAGSVATGTHGSGNGNGSLATAVRGLELVTADGGSQVLSRDEDGDRFAGSVVALGALGIATHLVLDLVPAFQVRQQVRTGLALSDALAHFDAITGAAYSVSLFTDWREDRFTQVWLKQLDGAPAPDLPWTEPAPGPLHPVPGVDPVHCTPQDGTPGPWHQRLPHFRPEFTPSNGEELQSEYLVPRAHAAHALDALAGLRGVIAPVLQICEVRTVAADDLWLSPAHGRDTVALHFTWIKDQPAVTPVLGLMEAALAPYEARPHWGKLFTTAPEQVRALYPRMDDFRALVAQADPEGVFGNAYLDTVLGG

SEQ ID NO: 180 - protein, 419 aa, Streptomyces radiopugnans
MAATPTKPTNWAGNVEFAARTLHRPATPDRLREIVAASDRVRVLGSGHSFNRIADTTGDLITLDDLPRAIEADPASGTVRVAGAVRFGELCPVLRRHGLALPNLPSTPHFTLAGAYATGTHGSGRTGGTLAAAVRSVELVTADGSQVTVSRGDEDFEGAVVSLGALGAVTALTVEACPAFEVEQYVHEGLPWAVLTEHPEEVFGAAYSVSVFTDWAGPARVWAKRRTGDPLPDLAWTGARPADGPRHPIEGMPTENATEQQGVPGPWDERLPHFRSGFMPSAGDELQSEYFVPAGRAGEAFAALRELGPLLAPVLQVSEIRTVAADPHWLSPAHGRDSVALHFTWTSDAAAVAPVLLRVEEALAPFDARPHWGKLSSTEAEALGDSYARWEDFRALLERLDPEGVFRNALIDRYFPRNR

SEQ ID NO: 181 - protein, 422 aa, Streptomyces niveus
MADGAGSNWAGNIVFSADRVHRPGTLDALRTIVAGSPRVRVLGSGHSFNRIADTDGALVSLAGLPRTVDVDTAAGTVRVGGGVRYAELARKVHAQGLALHNMASLPHISVAGSVATGTHGSGDGAGSLATAVRAVELLTADGDPLTLDREKDGERFAGSVVALGALGVVTSLTLDLVPAFEMRQSVRTGLPLAVLEEHFDAITSAAYSVSLFTDWRAPRFGQVWLKRLAGPAPDSPEPDFPWAARATEAMHPVPGMAATHCTEQHGVPGPWHARLPHFRAEFTPSNGSELQSEYLVPRQHGVAALRAVAELGTVMAPVLQVCEVRTVAADGLWLSPAEGRDTVALHFTWIKDTAAVVPVIRRLEAALDGLDARPHWGKVFTTAPAELRGRYPRMADFLALRGSLDPAGKFTNNFLRRLLFED

SEQ ID NO: 182 - protein, 425 aa, Streptomyces sp.
MLTTGAPTNWAGNITFRATRLHRPESVGELRRIVGSARCVRALGTGHSFNRVADTGGDLVRLDGLPNRFRIDSANRTVTVGAGMRYAEFAGQLHAAGFALGSLASLPHISVAGAVATGTHGSGDSRPSLSAAVAGLEVVGPEGDLFELSRESAPERLRGSVVALGALGIVTAVTLDIGPTFDVAQWVHTGLSLDRLAERHEEIFAAAYSVSVFTDWRGDDSMVWLKHRTDDAGGAGLGSERWQGARLADRPHHPVPGMPTANCTEQSGVPGPWHERLPHFRPGFTPSRGAELQSELLLPRAAAPAAFAALRGLGERMAPVLQVSEVRTVAADELWLSPAHGRDSVAFHFTWLPDTPAVLPVIAAIQEALLPLGARPHWGKLTAAAPVDVAGLYERAGDFRALLADLDPEGKFRNPYVESHFPAGT

SEQ ID NO: 183 - protein, 418 aa, Streptomyces sp.
MVALVTNWARNVTFGSQELLRPGSTDELRELVARSPRVRVLGAGHSFNRIADTDGVLVCLDRLPRVLEIDPARRTARVGGGVRFAELCAELRRHGLALANLGSTPHFTLAGAHATGTHGSGDRNGSLAAAVRAIVLLTADGSVRTLRRGDPEFGGAATSLGALGVVTELTVDLVPEFEVAQFLHEGLTWETLTERFDELFSSAYSVSAFTDWSAAPCRLWLKHRTGDPSPDLSRSGTRPAVAAHHPVPGMPATHVTEQLGTPGPWDERLPHFRSGFVPSSGTELQSEYFVPRADAAGALTALRGVGAALAPVLQIAEIRTVAADDCWLGPNHGRDSVAFHFTWVQDAEAVTRVLRTMEEALAPFGPRFHWGKLSCLPPEQLRRSYPRWDDFARLLSRLDPGGTFRNPFVDHYFPPAAG

SEQ ID NO: 184 - protein, 424 aa, Streptomyces sp.
MLTSGASAHNWAGNITFRAERLHQPASLDELRRVVAGARRVRTLGSGHSFNRIADTEGDLVRVDGLPRRVDIAPDGARVTVSAGLRYAEVASALHAAGHALPNLASLPHISVAGSVATGTHGSGNARRALSSAVSAVELVGPDGDLLTLTRDADPDRFPGAVVNLGALGVVTALTLDIEPSYEVAQWLYTGVPLDALSTRFDEISGAAYSVSTFTDWHSGLGTVWLKRRVDQDGLGHPGDDWLGGTPAREPWHPIPGMPAHHCTEQLGVPGPWHARLPHFRMEFTPSRGEELQSELLLPRAAAPAAFAALRELGAAFAPVLQTSEVRTVAGDDQWLSPAYGRDSVALHFTWIPDAQAVRPVIAAVEERLLPLGARPHWGKVSTASPADIVAAYERFGDFAELLTSHDPSGRFRNAFVDDLLAAH

SEQ ID NO: 185 - protein, 420 aa, Streptomyces sp.
MSGTAGTAGAVTNWARTITYTARAFHRPGTLDALAALVAGSARVRVLGSGHSFNRIADPGPDGVLLSTAGLPPVTEVDTAARTVRVSGGVRYAELARAVHAHGLALPNMASLPHISVAGSVATGTHGSGVDNGPLASAVREVELVVADGSAVTIGRGDARFDGAVTSLGALGVVTALTLDLEPAYEVEQHVFTELPLDGLDFTAVSAAGYSVSLFTDWREPGFRHVWVKRRTDQPAVRFPWAAPAGVPVHPVPGMPATHCTEQLGVPGPWHERLPHFRAEFTPSSGAEIQSEYLLPRSAAVDALYAIDGIRPAVAGVLQTCEVRTVAADPQWLSPAHGQDSVALHFTWVPDEAAVLPVVRRLEEALAPFDPRPHWGKVYEIPSAVVRGRYTRLADFRALARSLDPAGKFANTFVRDLLDG

SEQ ID NO: 186 - protein, 436 aa, Streptomyces hygroscopicus
MAETAGTTGTTGRTGTTGAGDTGTGAVTNWARTVTYAAREFHRPRTPQELAALVAENARVRVLGSGHSFNRIADPGPDGVLVSTAGLPRTIDVDTAARTVRVAGGVRYAELARTVHAHGLALPNMASLPHISVAGSVATGTHGSGVTNGPLASAVREVEMVVADGTTGTIGRDDARFGGAVTSLGALGVVTALTLDLEPAYGVEQRVYTELPLDGLDFETVAAAGYSVSLFTDWRRPGFRQVWVKRRTDRPAVDFPWAAPATEPLHPVPGMPAANCTEQLGVPGPWHERLPHFRAEFTPSSGEEIQSEYLLPRPAALDALHAIDGIRETVAGVLQTCEVRTVAADPQWLSPAHGRDSVALHFTWVKDEAAVLPVVRRLEEVLEPFDPRPHWGKVFLTPSAVLRGRYARFADFRDLVRTLDPSGTFANAFVRDLLDR

SEQ ID NO: 187 - protein, 452 aa, Streptomyces sp.
MTESAGATEPVTAGVEAGATQPATAGVGAGTVLPGQREHAGVFTNWARTVRYSARKFHRPRTPEELSALVAGSARVRVLGSGHSFNRIADPGPDGVLLSTAGLPPMTEVDTAARTVRVSGGVRYAELARAVHAHGLALPNMASLSHISVAGSVATGTHGSGVANGPLASAVREVELVLADGTAVTIGRDDARFDGAVTSLGALGVVTALTLALEPAYEVEQRVYTGLPLEGLDFEAVAAAGYSVSLFTDWREPGFRQVWVKRRTDRPAVDFPWAAPAAVPLHPVPGMPAANCTGQLGVPGPWHERLPHFRAEFTPSSGEEIQSEYLLPRSAARDALDAVDGIRPTVAGVLQICEVRTVAADPQWLGPAHGRDSVALHFTWVRDEAAVLPVVRRLEEVLDPFDPRPHWGKVYTTPPAVVRRRYPRLPGFRALVRSLDPGGTFTNAFVRDLLDG

SEQ ID NO: 188 - protein, 414 aa, Streptomyces sp.
MTGTVKNWAGNITYSAKEVHRPRSLDELASIVAGSARVRVLGSGHSFNEIADPGPGGTLVSLADLPPAVEVDAAARTVRVFGGVRYAELARRVHERGLALPNMASLPHISVAGSVATGTHGSGVGNGPLAAAVREVELLTADGTAVVIGRDEERFGGAVTSLGALGVVTALTLDLEPAFDVEQYVFTELPLAGLDFEAVMGAAYSVSLFTDWREPGFRQVWVKRRTDRALPGFPWAEPATRALHPVPGMPAGNCTEQFGVPGPWHERLPHFRAEFTPSSGAELQSEYLMPRSSAPAALAALDAIRADVAPVLQTCEVRTVAADAQWLSPSYGRDTVAVHFTWVEDTAAVLPVVRRVEEALDGFGARPHWGKVFTVPASVLRERYPRLADFRALAGELDPAGKFRNAFVDGVLDA

SEQ ID NO: 189 - protein, 414 aa, Streptomyces acidiscabies
MTASVTNWAGNISFVAKDVVRPGGVEALRKVVAGNDRVRVLGSGHSFNRIAEPGGDGVLVSLDALPQVIDVDTERRTVRVGGGVKYAELARHVNESGLALPNMASLPHISVAGSVATGTHGSGVKNGPLAAPVREVELLTSDGSLVTIGKGDARFPGAVTSLGALGIVVALTLDLEPAYGVEQYTFTELPLEGLDFEAVASAAYSVSLFTDWREPGFRQVWVKRRIDEPYAGFPWAAPATEKLHPVPGMPAENCTDQFGAAGPWHERLPHFKAEFTPSSGDELQSEYLLPREHALAALDAVGNVRETVSTVLQICEVRTIAADTQWLSPAYGRDSVALHFTWTDDMDAVLPAVRAVESALDGFGARPHWGKVFTTAPAALRERYPRLDDFRTLRDELDPAGKFTNAFVRDVLEG

SEQ ID NO: 190 - protein, 439 aa, Streptomyces sp.
MDKHSPEPVPAASEDDRKGTAQMTDPVQTVTNWARNITYTAAEFHRPDSPDALRSLVAGSARVRVLGSGHSFNRIADPGPRGVLVSIAGLPPETEVDTAARTVRVAGGVRYAELARAVHARGLALPNMASLPHISVAGSVATGTHGSGVTNGPLAAPVREVELVLADGSTETVARGDARFDGAVTSLGALGVVTALTLDLEPAYEVEQTVHVELPLEGLDFGAVAGAAYSVSLFTDWRDPGFRQAWVKRRTDQAPVEFGWGVPAKVAMHPVPGMPGGNCTEQFGVPGPWHERLPHFRAEFTPSSGDELQSEYLLPRATAEAALHAVDGIRRTVSAVLQTCEVRTVAADPQWLSPAHGRDSVALHFTWIDDLAAVLPVVRRLEEALEPFDPRPHWGKVYAMSGEALRDRCPRLADFRALARQLDPDGKFTNPFVAEVLED

SEQ ID NO: 191 - protein, 413 aa, Catellatospora methionotrophica
MATDGTNWAGNVTFRAARLHRPVTVDELRGVVAGARQVRALGTGHSFNRIADTPYDLVTVARLPRVAELDRGRSTVRVSAGTRYGELAPYLHRHGYALHNLGSLPHISIAGAVATGTHGSGDRNGNLATAVRGMELVTADGELVTVGTEDLPGSVVSLGALGVVTALDLAVVPTFEVRQRVYEHLPRAALEEHFDEVFGAAYSVSLFTRWRGPDVEQVWLKQRAGAEPIDGDLFGARPADGARHPIVTMSPVHCTPQLGEPGPWHERLPHFRLDFTPSAGDELQSEYFVPRSQALAAFAALDEIADRIALVVQVSEVRSIAADELWLSPAYGRDSIAFHFTWIADEAAVAPVVGAVEDRLIPLGARPHWGKVFGIDPALIRAQYPRLPDFTALTTRLDPEAKFRNPFLTRHLP

SEQ ID NO: 192 - protein, 423 aa, Plantactinospora sp.
MTTPLRNWAGNVEFRARKLHRPESVAELRALVAGSDRIRALGTGHSFNRIADTTGDLVSLAGLPPVLELDRAANTVTVSAALRYGDVVGELHQAGFALHNLGSLPHISVVGACATSTHGSGLGNGSLATAVAALELVTADGDLVTLRRDADGDDFLGAVVGLGALGVVTRITLDLVPAFEIAQYVYDDLPRDQLHAHAPEILGAGYSVSLFTDWTGPRINQVWLKRRVDAADGGAAEPHWFGATLAAEPRHPVPGMSAVHCTDQLGVPGPWHARLPHFKLEFTPSSGEELQSEYFVAREDLVGALTALDGIAERIAPVLQVSEIRTVAADELWLSPSYRRDSVGLHFTWVKETEAVLPVLAAIEERLAPFAPRPHWGKLFGVPPEQLRERYDRYADFAKLVRRYDPSGKFRNELLDRYFPTAG

SEQ ID NO: 193 - protein, 412 aa, Actinoplanes philippinensis
MPERLTNWAGNIGFEARRLVRPRSLDELREVVTGAGRARVLGSGHSFNRLADTDGDLISLAELPRTVEIAADRATVRVDGGIRYGELATRLAAEGLALHNMASLPHISVAGAVATGTHGSGVRNGNLATAVAGLEILRADGSVTTLDRSDADLAGAVVGLGALGVVTALTLDVVPAFELRQYVYEDLPEASLHEHLDEILSAGYSVSLFTRWSSAGIDQVWLKRAEPVSGDFFSARPADGPRHPVPGMPAVNCTEQGGTPGPWHARLPHFRMEFTPSSGEELQSEWHLPRSAALSAITAVSGLRERVAAVLQVCEVRTIAADDLWLSPHHERDSLALHFTWIADTEAVLPVVADLEKALAPLGARPHWGKVFTTSPADLRAAYPRFDDFAALVARFDPQGTFRNPWLDALLG

SEQ ID NO: 194 - protein, 426 aa, Microbispora sp.
MTQDVTNWAGNITFRAGRADRPSSLEELRGLVARSGKVRVLGSGHSFNHIADSPGALVSLDGLPPEIDIDSASEAVRVAASVRYGELGRRLHEKGYALPNLASLPHISVAGSCATGTHGSGDGNGGLATSVRAVEMVTAEGDLVTLSRDADGDRFGGAVVSLGALGAVVALTLDLLPAFEVRQRVYEGLPAEVLDDRFDAVMSAAYSVSLFTDWRTPRVNQVWVKERLAPASGGPDDSEPGGFFGAAPADGPRHPVPGVSPVHCTTQMGTPGPWFERLPHFRPDFTPSSGEELQAEYMVPRRHAAEAFRALGAIGHRIAPVLQISEIRSIAADDLWLSPSQGRDTVAFHFTWVKDPAAVTPVLTAIEERLAPFGARPHWGKLFTLPPDVLRSRYERMDDFAALARHYDPRGVFANEYVERYVFGRR

SEQ ID NO: 195 - protein, 408 aa, Unknown
  Description of Unknown: Kribbellaceae bacterium sequence
MTTNWAGNVEFASELQRPRTVGELQELVARSEKLRVLGTGHSFNRIADTTGTLVSVQDLPQVIEVGDRGVTVSAGTRYGEVTAALQAQGLALHNLGSLPHISVAGACSTGTHGSGDTNGPLADAVNAITFVNADGELVTLTRDDPDFAGSVVSLGALGATVSLTLDVQPSYQISQVVYDALPVDRLQSDFADVMGSAYSVSAFTDWVDPDVMVWRKRRELTDPDPEWLGARLADGARHPIKVMPADYATQQGGVPGPWNERLPHFRLEFTPSNGDELQSEFFVPRERAPEAVDVLRTLGKRFAPVIQVSEVRTVAADDLWLSPSQGRDTVALHFTWIQDEAAVRPVVAELEEALAPLDARPHWGKVFAADAATIAERYPKVKDFIALAAKYDPAGKFRNEYLDTFLPL

SEQ ID NO: 196 - protein, 417 aa, Jiangella sp.
MIAERTNWAGNLTYAAARVHTPSSVQELQDLVAQSDRIRALGSRHSFSDVADTTAELVSLAGLPSRIEVDRAHRTVTVAAGLRYGDLATQLQRKGWALHNLGSLPHISVAGAVATATHGSGDANGNLATAVSAVQLVGGDGELVTLRRGEPDFDGAVVALGALGVVVSLTLDLEPAFDVRQVVYDDLALSTAAERFDDIFATAYSVSIFTDWASGTALSWVKHRVTDGDDWTPDPIWMGARLADGPRHPVPGMPAEFCTEQQGVAGPWYDRLPHFRLEFTPSSGEELQSEYLVPREHAVEAFGAVAKLADRIAPVLHISEIRTVAADDLWLSSSYGRDVAGFHFTWKKDPGGVRPVMAEIERALAPYDARPHWGKLFTVDPAEVRERYPRLADFRRLRADYDPDATFGNDFLDRYVG

SEQ ID NO: 197 - protein, 421 aa, Planotetraspora kaengkrachanensis
MTHKVTNWAGNVAFRAERVERPSSLDELRALVARSPKVRVLGSGHSFNDIADSSGSLVALDGLPADVEIDSASATVRIAASVRYAELGRRLHEKGWAVPNLASLPHISVAGSCATGTHGSGNANGGLATAVTAIEMVTADGDLVTLSRDADGDRFPGAVVALGALGAVVTMTLDIVPAFEVRQYVYEGLAGEVLDERFEDVVSSAYSVSLFTDWRTSRINQVWVKERVEGEGDAPAPSLFGATPADGPRHPVPGVAADACTTQMGVSGPWFERLPHFRPDFTPSSGEELQAEYLLPRRHAVAALHALDDIRDRIAAVLQISEIRTVAADDLWLSPSYGRDTVAFHFTWVKDTAAVLPVLAMIEERLAPFDPRPHWGKLFTVAPEVLRSRYDRMDDFRALAQALDPARTFANEFVGRYVLGI

SEQ ID NO: 198 - protein, 413 aa, Actinoplanes derwentensis
MRERLTNWAGNIVFGAQRLHRPGSVDELRETLAGTSRARVLGSGHSFNRLADTDGDLISLAGLPRMVEIGPDRTTVRADGGIRYGELATRLAAEGLALHNMASLPHISVAGAVATATHGSGVRHGNLATAVSGLEIVRADGAVAQLTRADPDFAGAVVHLGALGVITALTLDVVEAFELRQYVYENLSAEALDEHLDEILSAGYSVSLFTRWTGTGIDQVWLKRAEPLTGDLFGATEADGPRHPVPGMPALNCTEQGGVPGPWHTRLPHFRMEFTPSSGEELQSEWHVPRSSGRDALAAVAALRERVSAVLQVCEVRTIAADDLWLSPNHERDSLALHFTWIADTDAVLPVVAEVEKAIAPLGARPHWGKVFSTDPAELRAAYPRFGDFAELAGRFDPAGKFRNQWLESLLGA

SEQ ID NO: 199 - protein, 407 aa, Actinoplanes cyaneus
MEPLTNWAGNITFGARQVLRPRSLDEAREQIAAATKLRVLGSGHSFNRLADTDGDLISLAGLPRTVQIAPDRATVRVDGGIRYGDLAARLHAEGLALHNMASLPHISVAGAVATATHGSGVGNGNLATAVAGVEIIRADGELVTLTRGDADFPGSVAALGALGAVVALTLDVQPAFELRQYVYEGLPATSVRAELPLILADGYSVSLFTRWTSADVDQVWLKRLEPMSGADFHGATLADGPRHPVPGMPAGNCTEQGGVPGPWHERLPHFRMEFTPSSGEELQSEWHVPLSRAGDAIDAVAQVRERVADVLQVSEVRTIAADELWMSPNYRRDSLALHFTWIADTEAVLPVVADVEKVLAPLDPRPHLGKIFTSAPSLPRSADFAALVRRFDPAGKFRNDFLDRLLG

SEQ ID NO: 200 - protein, 438 aa, Jiangella sp.
MRTILLDRPPRRRPDPARTLLAVSAERTNWAGNLHYGATRIHTPASVDEVQDLVARTGRIRALGSRHSFSDVADTTGELVSLARLPRLIKVDRAARTVTVGAGLRYGDVAAELHRRGWALHNLGSLPHISVAGAVATATHGSGDRNGNLATAVTGLQLVGGDGELLAVRRGDPDFPGAVVALGALGVVTTVTLDVVPAFDVRQVVYDDLATDTVAERFDEIFAAAYSVSVFTDWAGTTRAWVKHRVEDGDDWTPEPAWMGARLAAEPRNPVPGMPAVNCTEQLGVAGPWFDRLPHFRLEFTPSSGDELQSEFLVPREHAPDAFRAIAALAGRIAPVLQVCELRTVAADDLWLSSSYGRDVAGFHFTWRQDPDAVLPVLAEIEAALAPYDARPHWGKLFTAEPEQVQERYPRLADFRRLRGEYDPDDRFGNDFVDRYLG

SEQ ID NO: 201 - protein, 417 aa, Actinoplanes regularis
MYTRRVAEVEPLTNWAGNIAFRARQVLRPHSIDEVRDLVAKAPKLRVLGSGHSFNRLADTEGDLLSLAGLPRIVEIGPDRRTVRVDGGIRYGELAARLHAEGLALHNMASLPHISVAGAVATATHGSGVRHGNLATAVAGVELVRADGELVSLARGDAGFPGSVAALGALGAVVALTLDVQPTFELRQYVYENLPATSVRDHLDELLADGYSVSLFTRWTSADVDQVWLKRTEPRTGATLFGATLADGPRHPVPGMPAENCTRQGGVPGPWHERLPHFRMEFTPSSGEELQSEWHVPRVHARDALAAVAKIRERVAAVLQVCEVRTIAADDLWLSPNFERDSLALHFTWIADTEAVLPVVADLEQLLGPFGARPHLGKIFTTAPVDGYPRLADFTALVDRFDPAGKFRNEFLDRLLG

SEQ ID NO: 202 - protein, 412 aa, Actinoplanes brasiliensis
MSEQVTNWAGNIVFNARAVRRPGSVGEVQEIVAGGGPIKVLGSGHSFNRMADTDGTLISLADLPRVTEISADRKSVRVDGGVRYGDIAAYLHTNGLALHNTASLPHISVAGAIATATHGSGVTNGNLATAVSSIEFVDGSGKLVTVSRGDADFEGVVVHLGALGIITALTLDVVPAFDIRQYVFDTVPRASLDGNLDAMLADGYSVSLFTNWSSRDISHAWLKRTEPIGDEWYGARLADGPRHPVPGMPAQNSTEQGGVPGPWHTRLPHFRMEFTPSSGEELQSEYHVARADGLAAIDAVASIRERVAAVLQVCEVRTIAADNLWLSPNYHRDSMALHFTWIADADAVTPVVAELEQVLAPLSPRPHVGKVFTMAPETIRQGWERFADFQALVAKYDPAGTFRNDWLAEILG

SEQ ID NO: 203 - protein, 420 aa, Glycomyces sp.
MPERAPLHNWAGNIAFSPARFEAPATLDEARAVVAGAERVRVLGSGHSFNEIAASDDVMLSLAGIEPFAELDILKGTVRAAGWLTYAALSAAVHRAGFALHNMASLPHISVAGSIATGTHGSGDRNGNLATAVAAIEFIGPDGELRTVRRGEEDFAGSVVHLGALGVVHSVTLDLLPAFEMRQYVYDGLPLDAVLANFDELTGAAYSTSLFTPWGAEPEFQFWVKQRTADQTHPFPPSSRFGAPLADGPRHPVPGVDPEACTVQQGQTGPWHERLPHFKPEFTPSSGDELQSEYLIARTDAVAALKALAGIGERLGSVLQICEVRTMAADDLWLSPAFERDTVGLHFTWTSDEAAVRPVVGALEAALEPFSARPHWGKLFTIPMNEIGSRYRRMGDFAKLRARVDPEGKFTNDFSAGLFD

SEQ ID NO: 204 - protein, 414 aa, Kribbella sp.
MTQLTNWAGNISFESPLERPQSVPELQELVAGSEKVRVLGTGHSFNTIADSTGTLVTVADLPQVIDVGDSGVTVSAGLRYGEITAALQSKGLALHNLGSLPHISVAGACATGTHGSGDTNGPLADAVNAITFVTAAGELVTLTRDDPDFGGSIVTLGALGVTVSLTLDVQPSYDISQIVYDGLPVDRLGSDFAEVMGSAYSVSAFTDWVDPDVMVWRKQRAGSPIDTDWLGARVADGPRHPIKGMPADYATQQGGVPGPWNERLPHFRLEFTPSNGDELQSEYFVPRAKAAEAFEVLRALGKQLAPVIQVSEVRTIAADELWLSPSQGRDTVALHFTWIQDEAAVLPVVTALEEAINPLGARPHWGKVFAADAGYLRSCYPKVADFIELAAKYDPDGTFRNPYLDKYLPLRSQG

SEQ ID NO: 205 - protein, 404 aa, Actinoplanes sp.
MTNWAGNITFGARRVLRPRTLDEVRDAVASATELRVLGSGHSFNRLADTAGDLLSLAGLPRVVEIAADRRTVRVDGGIRYGELAARLHAEGLALHNMASLPHISVAGAVATATHGSGVRHGNLATAVAGIEIVRADGDLVTLSRGDADFPGAVASLGALGAVVALTLDVQPAFELRQYVFENLPAASLRAHLDEILAAGYSVSLFTSWTGTGIDHAWVKRLEPFTGDTFFGATPADGPRNVVPGMPAENCTEQGGVPGPWHERLPHFRMEFTPSSGEELQSEFHVPRSHASAALEAVAGIRERVASVLQICEVRTIAADDLWLSPNHGRDSLALHFTWIADTEAVLPVVADLERALAPFDARPHLGKVFTSAPALPRLADFAALARRFDPAGKFRNEFLDRLLP

SEQ ID NO: 206 - protein, 407 aa, Kribbella solani
MGAVTNWAGNVHFASELRRPRTVEELQELVAAAAKVRVLGTGHSFNRIADSTGELVSVLDLPKVVDVGADGVTVSAGLRYGEITAALQAQGLALHNLGSLPHISVSGACATGTHGSGDGNGPLADAVGSITFVAADGELVTLTRADPDFAGSVVSLGALGVVVSLTLDVQPAYQISQVVYDGLPVDRLESDFDAVMSSAYSVSAFTDWVDPDVMVWRKRRELEAPAPEWLGARLADGPRHPIKVMPAGYATQQGGVPGPWNERLPHFRLEFTPSNGDELQSEYFVPRDRAGEAIGVLRALGNRFAPVLQVSEVRTIAADDLWLSPSQGRDTVALHFTWIQDESLVRPVVDALEAALAPLGARPHWGKVFTGLTEQYPKVQDFIALANTHDPNGKFRNGYLDTYLPRG

SEQ ID NO: 207 - protein, 425 aa, Planomonospora parontospora
MTKTATNWAGNIAFRAGRVHRPSSVPELRALVARSARIRALGTGHSFNDIADSPGDLVSLAGLPPEVETDAGTGTVRVAASVRYAELGRRLHEAGYALPNLASLPHISVAGSCATATHGSGDANGNLATAVSALELVTADGDLVTLSQDVDGDRFRGAVVGLGALGVVVAMTLDVVPAFGVRQYVYEGLPFEALDDHFDAIVSGAYSVSLFTRWSGPLVDQVWVKHRIAPEDARAGEDLPDLYGARPADGPRHPVPGMSAVHCTEQLGVPGPWFERLPHFRPDFTPSSGEELQSEYLLPRRHAVAALRALDRVRDRIAPVLQVSEIRTVAADELWMSPSYRRDTVAVHFTWVKDTPAVLPVIGLLEEVLEPFEARPHWGKLFATPPAVLRSRYERLPDFLNLVRGYDPAGKFSGDFLERHLLRDR

SEQ ID NO: 208 - protein, 414 aa, Streptomyces sp.
MRETVTNWARTVTYDAKEYLRPASLDALRALVSGAAKVRVLGSGHSFNRVADPGPDGVLLSTAGLAPLIEVDTAARTVRVSGGVRYAELARAVHARGLALPNMASLPHISVAGSVATGTHGSGLANPPLASAVREVELVVADGTTVTIARGDARFDGAVTSLGALGVVTALTLDLEPAFAVEQRVFTELQLEGLEFEAVAGSAYSVSLFTDWRDPGFRQVWVKRRTDRPAVDFPWAAPAAVPMHPVPGMPAVNCTEQLGVVGPWHERLPHFRAEFTPSSGEEIQSEYLVPRAAAIGALRAVEGIRESVAGVLQTCEVRTVAADPQWLSPAHARDSVALHFTWVRDEAAVLPVVRGLEEALEPFEPRPHWGKVFGMPAAVVRGRYERLDDFRALVRDLDPTGKFTNAFVGEVLDG

SEQ ID NO: 209 - protein, 423 aa, Streptomyces alni
MRTMRTTRTNWAGNITFSAQRVHRPATVAELRSLIAASRRVRVLGSGHSFNDIADTDGTLVELTGLPPEIDIDTAARTVRVGGGVRYAELAQRLHDNGLALPNMASLPHISVAGSVATGTHGSGDRNGGLGTCVSAVELVTGDGGTAELSRDKDGDRFDGAVVALGALGVVTALTLDVVPDFAVRQYVFTGLELADLDGRFDAITGAAYSVSLFTDWRAPRFRQVWLKQLADQPPPDVPWAAPATGPAHPVPGADPVHCTVQQGVPGPWHERLPHFRPGFTPSSGAELQSEYLLPREHALPALHALAAIAAEIAPLLQICEVRTVAADRQWLSPAYGRDTVALHFTWVPDTPAVLRVLTLMEQRLAPYEPRPHWGKVFTEDAAGLRARYPRMADFDALAAELDPARTFRNAYLDRLLPARDPS

SEQ ID NO: 210 - protein, 433 aa, Streptomyces sp.
MLTAGAPAQNWAGNVTFDAARLHRPATREALRRIVSVARKVRVLGSGHSFNLIAATDGDLVRVDGLPPVFELDRERSSVTVSAGMRYAEVAAALHAEGLALANMASLPHISVAGSVATGTHGSGDRRPGLAAAVSSVRLIAPGGEELTLSRAADPERFPGAVVNLGALGVVTELTLDVEPAFEVAQWVHRDVALPVVAERFDEVFGAAYSVSVFTGWAPGTPGTVVLKQRTGTENGTGGTGGTIGAGGPEPDWLGGRPADGPWHPVPGMPAEYCTVQGGVPGPWHERLPHFRPGFTPSRGEELQSELFLPRAAAPRAIAALAGLGERVAPVLLVSEIRTIAADAQWLSPCHGRDSVAFHFTWRKDPEAVLPVLAEVEDALMPLGARPHWGKITTRVPATVAACYQRMPDFRRLAAEIDPYGIFRNEFVSALLE

SEQ ID NO: 211 - protein, 422 aa, Micromonospora sagamiensis
MAADGRGTPDTGVPPRNWAGNVTWSAARRHRPTSVDELRDLVAASRRVRAVGSRHSFNRLADTSGDLVAVDGLPPTVEVDPAAGTATVAAGLRYGEVATRLHEQGYACANLASLPHISVAGAVATATHGSGVRNGNLATSVVAVELVTADGDLVRVDSSDGRFAALVVGLGAFGVVTRLTLALVPAFEMRQYVHLDLPREAMDEAFASAYSVSLFTSWRGPGFDQVWRKQLVDQEPPPARWLGATAADTPRHPVPGMSADPCTVQLGVPGPWYERLPHFRPGFTPSSGAELQSEYHVPRAAAVEALAALDGVRDRIASVLQICELRTVAADRLWLSPQYDRDTCSIHFTWIADAGAVAPVVAAVEERLATFAPRPHWGKVFGLTPTAVAAAYPRFADAVAATVAADPTGKFRNDLLERYLPR

SEQ ID NO: 212 - protein, 421 aa, Micromonospora olivasterospora
MGEREPVVAVPGRNWAGNIRYAAARRHRPSTVDELRRLVAGSDRIRAIGTGHSFNRLGDTTGDLVSLAGLPPTVKIDRERATVTVAAAARYGELAARLHAAGYALPTLASLPHISVAGAVATATHGSGVGVGNLATAVSALELVTADGDLLSVRRDADGDRFAGTVVGLGALGVVTRVTLDVVPTFDVRQYVRLGLPRVALDEAFASAYSVSLFTDWRGDRIGQVWRKQLADEPPPPADWLGTTAAGEPCHPVPGLAAANCTAQLGEPGPWHERLPHFRLGFTPSSGNELQSEYHVPRAAAAEALAALDPARDRIAEVLQVCELRTVAADGLWLSPQYERDSLAVHFTWIADAEAVAPVVAEVERRLEPFAPRPHWGKVFGLDPAAVAAAYPRHADFVALLRDLDPAGKFRTPDLDRYFPR

SEQ ID NO: 213 - protein, 414 aa, Micromonospora sp.
MTDVARRNWAGNVAYAARRFHRPSTVDELRRLVAGSDRIRAVGTGHSFNRLGDTTGDLVSLAGLPSSLEVDRERGTVTVAAALRYGDLATRLHAEGLAVANLASLPHISVAGSVATGTHGSGDGNRNLAAAVAALELVTADGDLLTVSRADGDRFAGMVVSLGALGVVTRVTLDVVPTFAICQYVRRDLPADRLDAAFASAYSVSGFTTWRSSTVDQVWCKQLADQPPPPADWLGTTAVEAPLHPVPGLDPVHCTAQLGEPGPWHERLPHFRLGFTPSSGDELQSEYHLPRAAAAGALAALAGMRDRIAAVLQISELRTIAADDLWLSPNQGRDSLAIHFTWVDDPAAVLPVLAEVEERLAPFAPRPHWGKVFTLDRSSVAAAFGRYADFAALLAELDPSGKFRTDLLDRYFPR

SEQ ID NO: 214 - protein, 412 aa, Micromonospora sp.
MMQRMTDTNWAGNVSWSARTRSRPTSTDDLRRLVAEADLVRAVGTGHSFNRLGDTTGTQIALDGLPPAVALDPDRGAVTVAAGVRYGDLATALQAQGYALANLASLPHISVAGSVATATHGSGVRNRNLAAAVAALELVTADGDLITVDRADPRFAGLVVNLGALGVVTRLTLDVVPTYEIRQYVRLGLPRAALDEALDAEYSVSVFTSWRSERFDQVWVKQYADQAPPPADWLDTEAADSPRHPVPGMSPEHCTAQLGEPGPWHERLPHFRLGFTPSSGDELQSEWHVARDDAAAALAALDPVADRIAAVLQICELRTIAADELWLSPNYRRHSLALHFTWIGDPVAVAPVLAEVETRLAPFAPRPHWGKLFDRDPAAAYPRHADFAALLREFDPKGKFRTAEMDRYFPRD

SEQ ID NO: 215 - protein, 413 aa, Streptomyces sp.
MRNWAGNVDLGADPPARPRSTDELRRIVADSARVRAVGSGHSFSGVLSRGGTAVVLDGLPPVVEIDAAARTVTVSAGLRYADVAAHLHRAGYALANLPSLPDLTAAGACATGTHGSGDGRRGLAAAVCGLQLVGAQGESVELRRETDPGVFAGAVVSLGALGIVTRMTLEIEPSFEVAQSLRTAVPVAEVQDRFDDVFGAAYSVSMFTMWAGDAVVWLKRRTDRPAPEPDFGVPAPGPLHPVPGADPASCTPQLGAPGPWHERLPHFRAGATGPAGDELQSEYFLPRAAAPAAFAALRGLGGTLGPVLQIGEVRTVHHDDLWLSPAYERDSVTFHFTWIRDTARVLPVIAAVEERLAPLGARPHWAKLTAMTGPEIRSRYRRAADFQELRATFDPGGKFSNALLDDVFPAGAR

SEQ ID NO: 216 - protein, 430 aa, Streptomyces sp.
MRNWAGNITFGTARVSRPESVDELRRIVAGSERVRALGAGHSFSEILGTAGSFVRLDGLPPAVDIDAEAGTATVTAGMRYADVADELHRAGYALANLASLPDITVAGACATGTHGSGDTQRALAAAVTGLEMVGPEGDLVELRRDVDHDTFAGSVVSLGALGVATRMTVEIEPSFEVAQSVRVAVPLAEVQGRFDDVFGAAYSVSVFTQWADDATVWLKRRTDRPMADLDLGTPAQGPLNPVPGSDPAPCTAQLGVPGPWHERLPHIRTGTAPRLGDELQSEYFLPRSAAPAAFAALRELGALLGPVLHVAEVRTVRGDDLWLSPAYERDSVTFHFTWIKDIARVPPVIAAVERALVPLGARTHWAKLTAMTGAEIRSGYRRAPDFRELTRKFDPDGKFGNDFVDELFSAPIETPCPQPTRETRAWKSDL

SEQ ID NO: 217 - protein, 419 aa, Micromonospora sp.
MTTAGAGPRHNWAGNVRYAARRHHRPSSLDELRRLVAGSDRLRVVGTGHSFNRLGDTTGDLVSLAGLPATVALDPDRRAVTVPAAMRYGDLAAWLHARGHALANLASLPHISVAGAVATGTHGSGETIGNLASAVAGLELVTAGGDLLTVDRAADGDTFAGMVVSLGALGVVTRVTLDVVPTFEIRQHVRLGLSRAALDAAFASAYSVSVFTDWRSPRLREVWVKQRADAAPLPADWLGTTAADAPRHPVPGMPARNCTPQLGEPGPWHERLPHFRLGFTPSSGAELQSEYHVPRGSASAALAALDPVAHLIAPVLQVCELRAVAADGLWLSPNHGRDSLAIHFTWTADAAAVLPVVAAVEQRLAPFAPRPHWGKVFGLAPAAVAAALPRYADFLDLACRLDPAGTFRTDLLDAYLPRP

SEQ ID NO: 218 - protein, 413 aa, Micromonospora sp.
MVRRNWAGNVTYSARRRHRPESLDELRRLVAGSDRVRAVGSGHSFNRLGDTTGDLVSLAGLPQHVTLDRDRSTVTVPAAMRYGDLATHLHAEGYALANLASLPHISIAGAVATGTHGSGERNGNLATAVAALDLVTADGDVVSVDRAADGDTFDGTVVSLGALGVVTRVTLDVVPAFTLRQEVRLGLPREALEEALGAAYSVSVFTDWRSTLLREVWIKQRAELPPPPADWLGTTAADRPRHPVAGMPAEHCTPQLGVPGPWHERLPHFRLGFTPSSGEELQSEYHVPRAAAVAALAALDGVAHRIAPVLQVCELRTVAADRLWLSPNHGRDSFAIHFTWIADAEAVAPVVAAVEERLAPFAPRPHWGKVFGTAPVAVTAAWPRHADFAALAARLDPAGKFRTELFDRYFPAR

SEQ ID NO: 219 - protein, 428 aa, Streptomyces sp.
MPSDRAPEPRTNWAGNVTFTAARVHRPTGLDELRRTVAAAASVRVLGTGHSFNRIADTDDADGTLLAVDALPPRYELELDRDRGTVTVAAGMRYAQVAERLHADGFALANLASLPHISVAGAVATGTHGSGDGNRGLASAVAGLELVGPDGDLVRLDRHQRADTGFAGAPVHLGALGVVTAVTLDVVPGFELSQHVYTGLPLDALAEDLTAVTGAGYSVSVFTDWHAPLARIWLKRRTDAPPPPATLLGAVPATEPLHPIPGVPATHCTAQLGVPGPWHRRLPHFRPEFTPSVGEELQSEFLLPRTAAPAAFAALRALGARIAPVLQISEIRTVAADRLWLSPAYGRDSVALHFTWFRDPAAVAPVLAAVEQALTPLGARPHWGKLFTATPGEAAAGYERVGDFRTLMNRHDPEGKFRNAFLRSLHDA

SEQ ID NO: 220 - protein, 414 aa, Streptomyces sp.
MTDTVTNWARTITYTAEAYRRPPTLDALRALVARSAKVRVLGSGHSFNGIADPGPHGVLLSTAALPPVIEVDAAARTVRVAGGVRYAELAREVHAYGLALPNMASLPHISVAGSVATGTHGSGVGNAPLASAVREVELVVADGSPVTIARGDKRFDGAVTSLGALGVVTALTLDLEPAYDVAQHVYTGLPLRGLDFAAVAAAGHSVSLFTDWRAPSFGQVWVKRRTDRPAVDFPWAPPAAGPVHPVPGMPAANCTEQLGVPGPWHERLPHFRAEFTPSSGEEIQSEYLLPRPAAVDALEAVAGVREAVAAFLQICEVRTVAADAQWLSPAHGRDSVALHFTWVRDAPAVLPVVRRLEEALAPFDPRPHWGKVYEVPAAGLRRRYPRLADFRALARALDPAAKFTNAFVGDLLAG

SEQ ID NO: 221 - protein, 418 aa, Micromonospora sp.
MTAAVTNWARNVTFAARHVHRPTTVDELRQVVGRSTRLRVLGTGHSFNRIADTDGDLVSLAGLPAEVTVDSETSTVTAGGGVRYGELAEHLHAHGYALHNLASLPHISVAGACATATHGSGRGNGNLATAVRAVELVTANGDLVRLDQSHPDFAGAVVGLGGLGVVTSVTLAIEPTFDVAQYVYHGLSRDALTAGWEQLQASGYSVSMFTGWTGTGIDQVWVKRRTDQDHPPVDADGLGLAAADGPRHPVPGMPVENCTSQLGVAGPWHTRLPHFRLDFTPSSGAELQSEYLVAAGDVVDALDAVARIRDRIAPVLQVCEIRTVAADELWLSMNHTRDSVAIHFTWVADATAVTPVTAAVEQALAPYAPRPHWGKLFGIGRDELAGRYSRWNDFADLLVRYDPAGVFHNDFLDRYFPR

SEQ ID NO: 222 - protein, 414 aa, Streptomyces sp.
MTETLTNWAGNITYSATELHRPSSLDALAALVAARPKVRVLGSGHSFNTIAEPGDRGVLLSLTGLPPAVDVDADARTVRVAGGVRYVELARRVHQEGFALPNMASLPHISVAGSVATGTHGSGVGNGSLASAVREVELITADGSAVTIGRGDERFDGAVTSLGALGVVTALTLDLEPSYQVSQHVFTELPLEGLDFEAVSAAAYSVSLFTDWGRPGFRQVWLKRRTDRAPHDFRWAAPATVAMHPVPGMPAVNCTEQFGVPGPWHERLPHFRAEFTPSSGAELQSEYLLPRSDASAALHALDAIRDALSPVLQVCEVRTVAADRQWLSPAHGRDTVALHFTWVQDTAAVLPVVRRVEEALDAFDPRPHWGKVYAMPSSVVRGRYPRLADFTRLAAALDPAGKFRNAFVREVLGA

SEQ ID NO: 223 - protein, 411 aa, Streptomyces sp.
MTTTDPLTNWAGNLAFAARAVHRPRAVEELQELVGRSERVRALGSGHSFSPVADTDGDLVQLDDLPDRIDLAPDRRSVTVSAATRYARLAPVLHAAGLALENLASLPHISVAGATATGTHGSGDGRRSLSAAVRSLELVGADGELRTLTDPGAVVHLGALGIVTAVTLDVVPAYSVRQYVHVGLALADYAAELDEIHAAGYSVSLFTDWGSDTGRVWVKQLADGSPAATVPGARPADGPEHPVPAMPAVNCTPQQGVPGPWHQRLPHFRAEFTPSSGAELQSEFLLPRTAAPAAVAELRALGAQLAPVLHISEVRTVAADELWLSPSHGRDSVAFHFTWKPDLAAVAPVLAAVERALLPLGGRPHWGKITSPGQAGRNYERLPDFLALRRSLDPAGKFANRFTEALAEAAG

SEQ ID NO: 224 - protein, 755 aa, Unknown
  Description of Unknown: Fusarium longipes sequence
MALPSPPSKAWDDQVDQRVNHIIRKLDENPKFAEKNVPGLKDLLSDFASPYVKVSGAEFHRRLLRVFRDSETDGTYSWMLSQHTPEERQNIEQFVAGASLQDIGQSFVLGPSLGCREEICKLQQADAIVQITPHSGIEHIQPQGQPIRDPSCIAGLINSRFCKTVRGADDWFEKVIKKLSDFLDGQEPGQRIKVYKNAKFQNWGLNITNTPNLTCVPSTTTDIQAIVKLAKIRKMSVRCCGYRHSWSPIFGKEGQILISLLDITTSTSLPNFEALPILQPPPSELQKIEFVAGKPRTFGNKLVRIGCATTNERLRRWCIEQGTVTIPLNIIMVEVTIGGGNAAICHGAGRRHGTLSDLVRKVEYVDANGEVRYVEKPEHLRAASGCFGLMGVVTHITMEFPPMSYAELAPKKIPVIQAVPPPPDLSENEIPPALLRYWKPLSYSEKQKCQADFERRATNDYYAEWFWFPYSDYSWVNTWNATNDPQGVVPFPDDAHIVLSFIQTVGMNILQNAKIINDLVELADLSETAVTLISIAAMKALPDKRVKTSLPDALHFQRAIQNVRVRNVEVEIPLVAKKDDPKNTINYAPVQRAWWDAILLTYKNSHDCPMRMPLEMRIMGGSDMIMAPQRGNSLGTCSIEVLTLYSASSIWQPFAQSVLDKWMALRDPATGQPLKIRPHWAKEWYDYNVDGKPWIQRLKSVDYRDERQEFLRILDEIGKESGWTLQDLQARFSNELFDEFFFDEARRATKSRWRK

SEQ ID NO: 225 - protein, 417 aa, Streptomyces sp.
MPDTRPMNWARNITFSAAAVHRPATPDALRQLVARSPHVRVLGSGHSFNRIADVDEARDGTLVSLGALPAGIDIDKAARTVRVGGGVRYAELAAQLHSHGLALPNMASLPHISVAGSVATGTHGSGNGNTSLAEAVRAVEIVTGSGETVTLARGDDGFEGAVVSLGALGVVLSLTLDMEPDYEVSQHVFRELPFQGMDFEAVTSAAYSVSLFTKWRGPHFDQVWVKQRHPLPVDFPWAEPATDKQHPVPGMPAVNCTEQFGVPGPWHERLPHFRAEFTPSSGDELQSEYLLPREHAVAALAALDGVRDRIAPVLQVCEVRTVAADAQWLSPAYGRDTVAFHFTWVADTARVLPVVSLVEDRLRDLDPRPHWGKVFTAEPARVAARYPRAADFRALADRLDPDGKFANAFVRHVLPRP

SEQ ID NO: 226 - protein, 422 aa, Micromonospora sp.
MSSDLVNWAGNLTFGARHVHRPATMDELRAVVAGTPRIRALGTRHSFSDVADTTADLVTLENLPPVIEVDAETSTVTVGGGVSYAELARELDSAGFALANLASLPHISVAGACATGTHGSGVRNAVLAGSVRRLELLTADGDLRTVQRGDPDFPGVPVSLGALGVFTTVTLDVEPAYEVRQNVYLDLPVRAALDHFQELVSDAYSVCLFTDWGSTNFTQVWIIARTDEPEPKVPGQPWFSAVPATRDVHPVITNSAASCTTQRGLPGPWHTRLSHFRPEFTPSSGAELQSEYAVPTRDAVAALDALGEIAALIHPVLQICEVRTVAADEFWLSPAYGADVTTIHFTWIPEDAPVREVIRLVEERLEPFGARPHWAKLTEVPPHRIRPLYPRLADFQALALRYDPSGKFGNAFTERYLDGGAA

SEQ ID NO: 227 - protein, 425 aa, Streptomyces sp.
MRTSEARTRNWAGNITFGAARLHRPSSLDELRRIVAGAQRAHVLGSGHSFNRIADTEGDLLRVDGLPPRVEIDRDAGLVTLSAGMRYGELTAELHAAGLALANLASLPHISVAGSVATGTHGSGNGLRGLASAVTAMEFVGADGELFTLSRAADPERFPGAVVHLGALGVVTALTLEVEPAFEVAQWVTTDVPLDAVVAGYPEIAASAYSVSVFSDFHGGRATVLVKRRLDREEARHPGERWLGGTPAAGPWHPIPGMPATFCTEQGGVPGPWHERLPHFRAEFTPSRGEELQSELFLPRERAVEAVRELRGMADRFAGVLQTAELRTIASDDLWLSPTEGRDSMAVHFTWVKDIETVLPVLAEVESRLLPLGARPHWGKVTAATPAAIAACYPRLADFRRLAESLDPEGRFRNAYLDGVLAAAG

SEQ ID NO: 228 - protein, 312 aa, Streptomyces acidiscabies
MASLPHISVAGSVATGTHGSGVNNGPLATPVREVELLTADGSLVTIGKDDARFPGAVTSLGALGVVVALTLDLEPAYGVEQYTFTELPLEGLDFEAVASAAYSVSLFTDWREAGFRQVWVKRRIDEPYAGFPWAAPATEKLHPVPGMPAENCTDQFGAAGPWHERLPHFKAEFTPSSGDELQSEYLLPREHALAALDAVGNVRETVSTVLQICEVRTIAADTQWLSPAYGRDSVALHFTWTDDMDAVLPAVRAVESALDGFGARPHWGKVFTTAPAALRERYPRLDDFRTLRDELDPAGKFTNAFVRDVLEG

SEQ ID NO: 229 - protein, 413 aa, Streptomyces paucisporeus
MQSNWAGNLAFSAAEVRRPATVAELRSLVAAGRRAKALGSAHSFSDIADTDGTLIELSGLPPEIDIDTAARSVRVAAGVRYAELAAHLHARGFALPNMASLPHISVGGSVATGTHGSGDANGGLATSVSGIDLVTADGGIHTMSRAADGDTFDGSVVALGALGIVTHLTLDLRPAYEIRQRVLTGLELADATANFDAITSAAYSVSLFTDWRGPRFTQVWLKQLADAPGADFPWAKPAESKMHPVPGVDPVHCTEQFDVPGPWHERLPHFRPGFTPSSGEELQSEYLVPRTHAVAALTALDAMRGTIAPVLQVCEVRTVAADRLWLSPAQGRDTVALHFTWIKDTARVLPVLTALEGALAPYEPRPHWGKLFTTAPAEVRARYPRMPDFLSLAAATDPARTFSNGFLDRMLHA

SEQ ID NO: 230 - protein, 419 aa, Streptomyces rubidus
MRTNWAGNLTFSARRVHRPATLEELRRIVAGADRVKALGSGHSFNDVADTDGDLVDVRGLPAGIDLDSAAGTVRVAAGVRYAELAAELHAHGRALPNTASLPHISVAGSVATGTHGSGDGNGGLATSVRALDLVTAGGETAAFSRDTDGDRFDGTVVSLGALGVVTHLTLDTVPAYEVRQRVLTGLRLADATAHFDAITGAAYSVSLFTDWKAPRFTQVWLKQLAQDDGHAHDPGADLPWAVPAEGPVHPVPGMDPAYCTPQDGTPGPWHERLPHFRPEFVPSSGEELQSEYLLPRAHATAALDALAVLAPVIAPVLQICEVRTVAADRLWLSPAYGRDTVALHFTWIKDPAAVLPVLGRIESALAPLEPRPHWGKLSTVPAGQVRAAYPRMAAFAALAAETDPAGTFRNAFLNRLLDA

SEQ ID NO: 231 - protein, 413 aa, Streptomyces yanglinensis
MRTNWAGNLTFAAERVHRPATLDELRALVSGGRRVKALGSGHSFNDVADTDGYLVELTALPAEIDIDSAAGTVRVAAGVRYAELAAELYAHGFALPNLASLPHISVGGSVATGTHGSGDANGSLATSVAALDLVTAGGDTLTLSRDNDGDRFEGAVVALGALGIVTHLTLDLLPAFRVRQTVRTGLELPDALAHFDTLTGAAHSVSLFTDWRADRFTQVWIKRLDGTPEPELPWTVPAPGPLHPVPGVDPVHCTPQDGSAGPWHERLPHFRPDFTPSSGEELQSEYLVPRAHATAALSAVAALREHVAPVLQICEVRTVAADRLWLSPAYGHDTVALHFTWHKDPAAVTPVLGLIEAALAPYEARPHWGKLSTTDPDTVRGLYPRMADFQELVAATDPGGTFGNAFLRRLLVP

SEQ ID NO: 232 - protein, 449 aa, Micromonospora pallida
MADNEPRVAPRVGVPAQFRASTPHAGVPAQNRVGTPHAGVPARNWAGNVTWSAARRHRPTSVDELRALVAASRRIRPVGTRHSFNRLADTTGDLVAVDGLPPTVEVDRTRGTATVAAGLRYGEVAARLHEQGYALPNLASLPHISVAGAVATATHGSGERNGNLATSVVAVELVTAAGDLVRVDSTDGRFAALVVGLGAFGVVTRLTLALLPTFDVRQYVHLDLPREAMDEAFASAYSVSLFTDWRGTGFHQVWRKQRADQDPPPARWLGATAADTPRHPVPGLPGDTCTEQFGVSGPWHERLPHFRPGFTPSSGAELQSEYHVPRAAAAEALAALDRVRDRIAPVLQVCELRTVAADQLWLSPQYDRDTLSIHFTWIADAGAVAPVVAAVEERLAPFAPRPHWGKVFDLAPAAVAAAYPRFADAVAAMVTADPTGKFRNELLDRYLPR

SEQ ID NO: 233 - protein, 457 aa, Micromonospora citrea
MDVDGVRAAGRDGPPQPRREAGTPGGDGGPPRPRRGVDPPGDGAVPGRNWAGNVRYAARRRHRPASLDELRRLVAGGERVRAVGTGHSFNRLGDTTGDLVSLAGMPATVALDPDRRTVSVPAAMRYGDLAARLHERGYALANLASLPHISVAGAVATGTHGSGVTVGNLATAVAGLELVTADGDLLTVDRATDGDTFAGMVVSLGALGVVTRLTLDVVPAYDLRQYVRLGLPRETLDAAFASAYSVSVFTDFRSRRLREVWLKQRADAPPPPADWLGTTAAEGPRHPVPGMPAENCTPQLGAPGPWHERLPHFRLGFTPSSGDELQSEYHLPRGAAAAVLAALDPVAHLIAPVLQVCELRAVAADALWLSPNHGRDSLAVHFTWVADAAAVLPVVAAVEERLAPFAPRPHWGKVFGLAPAAVAAAWPRYADFLDLMRRLDPAGKFRTDLLDRYFPRS

SEQ ID NO: 234 - protein, 410 aa, Micromonospora nigra
MPPTNWAGNVRYAARAYHRPSAVDELRRLVAGSDRLRVVGTGHSFNRLGDTDGDLVSLAGLPGQVRLDEDRRTVDVPAAIRYGDLATWLHARGWALPALASLPHISVAGAVATGTHGSGDATGNLASAVTGLELVTADGDLLTVDRGTPDFAGMVVSLGALGVVTRVTLDVVPTYDLRQYVCLGLPRPALDEAFASAYSVSVFTDWRGARGTQVWRKQLADQPPPPADWLGTRAAEGPCHPVPGMPAQNCTAQLGEPGPWHERLPHFRLGFTPSSGEELQSEYHLPRAKAAGALAALDGVAHLITPVLQVSELRTVAADPLWLSPNHDRDSLAVHFTWIADAARVLPVVAEVERVLAPFHPRPHWGKVFGVDAAALAASYPRWDDFRALRRRLDPNGVFATAELDRHLPR

SEQ ID NO: 235 - protein, 430 aa, Streptomyces sp.
MTTSGAPAKNWAGNTVFHARRTHRPSSVEELRDIVASADRIRALGSGHSFNRIADTDGDLVRLDGLPPLVEPGTTAGEGRTVTVGAGMRYGEVAGVLHEAGLALANLASLPHISVAGCCATATHGSGDSEKCLAAAVTALEYVGPGGELVEVRRGSDPETFPGMVVSLGALGIVTRLTLSVEPSFEVSQHVFTGVPLARLASDFDEIFGCAYSVSAFTGYADGLARVWVKRRVTERDAGTRRSGWEGTTPADCAHHPIPGIEPTHCTEQLGVPGPWHERLPHFRPDFTPSNGEELQSELLLPRSAAPAALAALRELGGRVAPVLQISEVRTVAADDLWLSPAHRQDCVAFHFTWVKDADAVLPVIEAVEERLLPLGARPHWGKLTALPHEEIAGLYEQAGAFRQLLSERDPHGKFRNPFVDEVFAPAYSG

SEQ ID NO: 236 - protein, 432 aa, Micromonospora tulbaghiae
MSAELANWAGNLRFRARRVHRPTTLDEVRAVVAGADHIRALGTRHSFSDIADTAADLVSLEDMPPVTTVDARNATVTVAGGVRYAGLARELHAAGFALPNMASLPHISVAGSCATGTHGSGVRNTILAGSVRSLELVTAGGELVTVRRDDPDFAGVPVNLGALGVVTSLTLGVEPAYEVSTTVYLDLPVRAGLDHFRELMSDAHSVCLFTDWGAPVFNQVWVMARTDDPQPKSPGREWFSASPATRDLHPVSTQPAAACTGQRGVPGPWHTRLPHFRPEFTPSSGEELQSEYAVPAGHAVAALEALGEIAGVIHPVLQICEVRTVAADEFWLSPAYGTDVVTIHFTWIPDADPVRRTIRAVEASLEPFRARPHWAKLTEMPPERIRELFPRLADFRALARRYDPGGKFRNDFTDRYLGPATRRGGHGDGGSR

SEQ ID NO: 237 - protein, 426 aa, Streptomyces sp.
MMNSETSAAPSPEAAPSGTVPGPVRNWAGNQTFRAGVLHRPASAEALAALVAGAGERRVRVLGSGHSFNRIADVDAPDDLLVSLGALAPLIEVDAAARTVRVGAGVRYAELARVLDTHGLALPTMASLPHISVAGSVATGTHGSGDAVGSLATQVRALELLTADGDVRVLSREADGERFAGAVVALGALGIVTALTLDVVPAFLVRQDVFTGLALDSLAAHFDAITGAAHSVSLFTDWKEPCFGQVWLKRTDLGAPDFPWAAPTTEPVHPVPGMDATACTPQLGAVGPWHERLPHFRPEFTPSNGAEIQSEYLVARSDAVAALRAVAGVRERIAPVLQISEVRTVAADDLWLSPAYGRGTVALHFTWVPDAERVRAACGALEAALAPFAPRPHWGKVSTVPARERAGALGADGRLRGPGARVRSPG

SEQ ID NO: 238 - protein, 423 aa, Micromonospora krabiensis
MTTPLDHGGDAVPRRNWAGNVRYVAQRHHRPTDVDELRRLVAGSRRLRAVGTGHSFNRLGDSAGDLVSLAGLPPEVTLDRDRGTVTVAAALRYGDVATRLHAEGYALANLASLPHISVAGAIATGTHGSGEGNGNLATAVAALELVTADGDLLRVDRDADGDTFAGMVVSLGALGVVTRVTLDVVPTYDVRQYVHLGLPRAELDAALGSAYSVSLFTDWRSPRIGQVWRKQRADQPAPPAGWLGTTAADAPQHPVPGMPAENCTPQFGEPGPWHERLPHFRLGFTPSSGDELQSEYHLPRSAAAEALAALDPMADRIAAVLQISELRAVAADGLWLSPNHERDSLAIHFTWIGDEAAVAPVVAEVEQRLAPFTPRPHWGKVFGLDAEAVAAAWPRYRDFRALLDKLDPEGTFRTDELDRLFPR

SEQ ID NO: 239 - protein, 412 aa, Micromonospora auratinigra
MTDVPADRNWAGNVHYRAARRHAPTTVDELRRLVTGARRVRALGTGHTFNRLGDTTGDLVSTAGLPPTVELDRERGTVTVAAGLRHGDLATRLHADGYALANLASLPHISVAGAVATATHGSGRANGNLATAVAGLELVTADGDLITLDRTDRRFAGAVVGLGALGVVTRLTLDVVPTFDIRQYVRLGLPRAALDTALDAAYSVSVFTGWRSSSRFDQVWLKQHADQPPPSADWLDTTAADTPRHPVPGMPARNCTAQLGEPGPWHERLPHFRLGFTPSSGDELQSEWHLPREAAGAALAALDPAAERIAAVLQVCELRTVAADELWLSPNHGRDTLAVHFTWIGDAAAVAPVLAEVEERLAPFAPRPHWGKLFTADPTASYPRYDDFLALLGEFDPAGKFRTDELDRWFPR

SEQ ID NO: 240 - protein, 393 aa, Micromonospora sp.
MSAHRNWAGNVRYAARAYHRPSSIDELRALVAGSDRIRAVGSGHSFNRLGDTTGDLVTLTGLPATVRLDAQRRLVDVPAAMRYGELATWLHERGYALANLASLPHISVAGAVATGTHGSGVTVGNLATAVAGLELVTATGELLTVDRSSPDFPGMVVSLGALGIVTRLTLDVVPTFDIRQYVQLDLPRAALDEALGSAYSVSVFTDWRSTRGTQVWRKQLADQPPPPAGWLGTTAADRPWHPVPGMPTINCTEQLGVAGPWHERLPHFRLGFTPSSGDELQSEYHLPRAVAADALAALDEVAHLIAPVTQTSELRTVAADDLWLSPNQGRDSLAVHFTWIADAAAVLPVLAEVERALAPFAPASTGARSSPSKPRRSPPPTPTGQTSPPSCTT

SEQ ID NO: 241 - protein, 423 aa, Streptomyces spororaveus
MTGTLSNWANSLTYGARRVHRPRTVDALRALVAGTDRIRALGTRHSFSGVADTTGDLVRLDGLPESMELDPQAGTVTVAAGTRYAELAPYLHRAGWALGNMASLPHISVAGSVATGTHGSGDSQRCLAAAVSALELVGPQGDLVELRRDTHPEFAGAVVALGALGVVTRLTLDLEPAYQVAQTVCPDVPLDEVAADLDAVFGAAYSVSLFTDWRSGHGSVWLKRRTDRPDSGWGRGRGAAAPMHPVPGVDPGSSTEQLGVPGPWYQRLPHFPPELTPGAGEELQSEYFVPRSLAAAAFAALRALGDRIAPVLHIAEVRTVRGDDLWLSSAYGRDTVTFHFTWLKDLPAVRPVIAAVEEQLMPLGARPHWAKLTETPAERITAGYPRAADFVRLAEQHDPDGKFRSAFTDQFFTNPQKTMGVMR

SEQ ID NO: 242 - protein, 413 aa, Streptomyces sp.
MRTNWAGNLTFGAERVHCPATLDELRAIVAGSRRVKALGSGHSFNAIADTHGDLVELAALPAEIDVDSAAGTVRVAAGVRYAELAAHLHARGLALPNLASLPHISVAGSVATGTHGSGDANGSLATSVTALDLVTSGGDTLSLSRERDGDRFDGAVVSLGALGIATHLTLDVVPAFQVRQTARTALALDDALAHFDALTGAAYSVSLFTDWRVRGFTQVWLKRLDGTPEPDLPWTAAAPGPLHPVPGIDPVHCTPQDGTAGPWYERLPHFRPQFTPSSGAELQSEYLVPRAHGTAAIAAVADLRALLAPVLLTCEVRTIAADRLWLSPAYGHDTVGLHFTWRQDTPAVTAVLGRMEAALAPYGARPHWGKLATTDPATVRGLYPRMADFRALVADLDPDGTFGNAFTRRLLAP

SEQ ID NO: 243 - protein, 430 aa, Streptomyces longisporoflavus
MTDALATGRDGAVTNWAGNITFSASELHRPASHAALRSLVARSRQVRVLGSGHSFNRIADVDGDAVEGGATALVSLAAFEPSVDVDSKARTVRVSGGVRYAELARHVASYGLALPNMASLPHISVAGSVATGTHGSGNENRSLAEVVRSVELMTADGQTCVLSRGDDGFEGAVVSLGALGVVLALTLDLEPLYTVSQHVFGELALAGLDFESVSAAAYSVSLFTDWRGPRFNQVWLKHRGDAAVGFPWAAPVSEPRHPVPGMPAVHCTEQLGVPGSWHERLPHFRAEFTPSSGAELQSEYLLPREHALAALYALDALRAEVAPVLQVCEVRTVAADTQWLSPAHGRDTVALHFTWVPDAKAVLPVVTLLEERLAPFTPRPHWGKVFGAGPSELGARYPHAADFAALAGRLDPRGKFRNAFVRSFLRPFLG

SEQ ID NO: 244 - protein, 414 aa, Streptomyces minutiscleroticus
MTEAVTNWAGNITYTAKELHRPRSLDALRALVAESGRVRVLGSGHSFNTIADAGTEGALVSLADLPPVIDVDTAARTVRVGGGVRYAELAEAVHRHGLALHNMASLPHISVAGSVATGTHGSGDGNGPLAAAVREVELVTADGGTLVIGRGDARFGGAVTSLGALGVVTALTLDLEPAYEVSQRVYGPIPLDGLDHAAVAASAYSVSMFTDWRQSGFVQTWVKQRTDLPEPRFPWSEPVAEKRHPVPGMSPLNATEQFGVPGPWHERLPHFRPGFTPSSGAELQSEYLLAREHALDAIRALDAIRGTVAPVLQICEVRTIAADTQWLSPAYGRDSVALHFTWVEDTEAVLPVVGRLEEALDPFDPRPHWGKVFTVPSDVVRGRYPRMADFTALARELDPEGTFRNAFVRDALGL

SEQ ID NO: 245 - protein, 417 aa, Streptomyces flavofungini
MSDDDMVTNWAGNIAFTARRLHRPASPAELRALVTGARQVRVLGSGHSFNRIADTDDPDGTLITLAGLPPTVDVDTAARTVRVAGGVRYAELADRVHAFGLALANMASLPHISVAGSVATGTHGSGNALPPLSSSVCAVEFMTADGTLVTLRRGDAGFDGAVVSLGALGVVTALTLDLEPAYEVAQHLFVDLPLAGLDFDAVTSSAYSVSLFTDWRGPRFTTVCLKQRAGRGVDFPWAAPATEPHHPVPGVPADNCTRQLGVPGPWHDRLPHFRADFTPSSGAELQSEYLLPRADALPALQALDAVRETIAPVLQVCEVRTVAADTQWLSLAYDRAAVAFHFTWAPDPAAVLPVIARIEEALAPFAPRPHWGKLFRTPPTGLHAVHPRLADFAALVTELDPAGTFRNAFVRNVLGRA

SEQ ID NO: 246 - protein, 419 aa, Streptomyces roseolus
MPTAPIPTTNWAGNVTFGTSRIHRPHSVDELRRLVAGSRQIRALGSGHSFSQVADTTGELVRLDGLPRRMELDPAAGTITVAAGMKYAHMVEELHQAGFALPNMASLPHISVAGSVATGTHGSGDTLRSLAATVQAMEFVGPEGDVFEVRRDADGECFAGSVVSLGALGVVTALTLAIEPAYKMTQRVRIGVGLDEAAERLDDVFGAAYSVSLFTDWLGGECHVYLKGRTDRPISSWAGGREAAEPVHPCPGMPTDYCTEQLGVAGWWHERLPHFKAEFIPGAGEELQSEYFVPRAAARAAFEALGHIGSVIAPVIHISEVRSVRGDDLWLSPAYGQDSITFHFTWIDSETEIRPAMAAVEEALMPLGARPHWGKLTAADPAQVIGRYDRAGHFARLMAECDPARKFANSYVDALFPPR

SEQ ID NO: 247 - protein, 443 aa, Streptomyces sp.
MSSTASGKTSGKNATWRNWAGTVAARPAREVAPASAGELAEAVRRAAEDGLRVKAVGSGHSFTSIAATDGVLIRPHLLTGIRRVDRDAMTVTVEAGTPLKRLNAALAREGLSLANMGDIMEQTVAGATGTGTHGTGRDSASIAAQIKGLELVTADGSVLTCSERENPDVFAAARIGLGALGIVAAITFAVEPLFLLRAREEPMPFDRVLADFDELWAENEHFEFYWFPHTGNTNTKRNNRSAGPERPVGRWKGWFEDEFLSNGVFQAANWVGRAVPATVPAIARISSKALSARTYTDIPYKVFTSPRRVRFVEMEYAVPREAVVETLRELRAMVGRSRLRISFPVEVRTAPADDITLSTASGRETAYIAVHMFKGTPYRGYFTAAERIFTAHEGRPHWGKLHTRDAAYLSRVYPGFGQFTALRDRLDPDRRFQNDYLRRVLGP

SEQ ID NO: 248 - protein, 422 aa, Streptomyces fulvorobeus
MTTDDRRTAVTNWAGNVRFSARELVRPASLDELRQVVAGGRQIRVLGSGHSFNTVADSDDVLVSLAGLPPAVDVDTAARTVRVAGGVRYAELARQVHERGLALHNMASLPHISVAGSVATGTHGSGDANGPLASAVREVELLTAAGELVTLRRDGDGERFAGSVVALGALGAVTSLTLDLVSGFDVCQYVHTELGLSDALAHFDAITSAGYSVSLFTRWRDRSFGQVWVKCRADEPRPAFPWAPPAVEQLHPVPGMPAVNCTPQLGVPGPAHERLPHFRAEFTPSSGAELQSEYLVARTDAVAALTVLDGMREVIAPVLQVCEVRTMAGDEQWLSPAHGRDTVGLHFTWVPETAAVLPVLALLEERLAPFAPRPHWGKVFTVRPGLLRERYPRLADFEALARELDPSARFTNSFLRDVLYGA

SEQ ID NO: 249 - protein, 430 aa, Streptomyces sp.
MTTTAGNSAAQQMNWAGNVTFSAARTHRPDSLDAIRAVLARAERVRVLGSGHSFSDIADTDGELVSLEALPTSIDVDTDAATVRIGGGIRYGELAAAVNAKGLALPNMASLPHISVAGSVATGTHGSGDANGSLATSVRSFELLTADGELHVLDRERDGDRFAGSVVSLGALGVVTALTLDLVPAFAVRQDVFTGLPQDAVIEQFDALTSAAYSVSLFTDWRAPRFTQAWFKQRVTGDGHAAPDLAWATPAAQPMHPVVGVPPLHCTAQGGVVGPWNERLPHFRAEFTPSSGDELQSEYLFDRRHAADALRAMSALGPVLAPVLQVCEVRTVAADGLWLSPAYGQDTVGLHFTWTSDAAAVLPVIALLEAALEPWAPRPHWGKLFTLGAATLHERFPRLDAFSRLRTEYDPHRVFDNAFLQRVLGHEDDA

SEQ ID NO: 250 - protein, 750 aa, Unknown
  Description of Unknown: Fusarium flagelliforme sequence
MATSTVPSLAWDHQVYDRANHIVEKLDENPEFSKTNAPGLRDLLSDFASPDVKVSDVDFHRRLLKVLKDSETDGTYSSMLKMYTPEEQEKIQRFVAGENVKDLAENFVPGPSLGCRQGIDKLQQAESIVRITHESINDIKKPGPEGDLLATFRQTNSVVDDWFTEAVVGLRDFFSRSKPGQEIMVYKNAKFQNWGLNVENTPFLTCIPSTTADIQSIVRYAKDNNMSVRCSGYRHSWSPIFGKDGQILISMLDLKTATSLPNIESLPLPQSSPTELQQIGFASGKPRVSGNKLVRVGCAVTNERLRRWCIKEGTVTIPLNVIMVEITLGGSNAPICHGAGRQNMTLSDLVRKVEYVDANGNLQTVEKPEHLRAASGCFGLMGVVTHITMEFPPMSYAQLDPKKIPVIQAVPPPPGLAEKDIPPALLKYWTPLSDVEKQKCQKDFEDRATNDYYAEWFWFPYSDFSWVNTWNKTDDPKGVESFPSPTQIILSFFETAAMNMVQNAPLFKELINIAHLSEGLVTIISAGAMKALPQDPVKTFLPDALHFQRAIQNVRVRDIEVEMPLVAKKGGHAGIIDYTPVQQAWWDAILLTYQNSDTCPMRMPLEMRIMGGSDVIMAPQRGNSLGTCSIEVLTLYSAREIWPKFAQSVLDKWMALKDPSTGEALKTRPHWAKEWYGYKVDGRPWVERLKAVDYKEERKEFLQTLAEIGKEAKEPWSLQDLQARFSNVLFDNFFFDGKAQIANGTSNEGK

SEQ ID NO: 251 - protein, 417 aa, Streptomyces sp.
MTLDTATNWAGNLTFGAARWHRPRSVDELRRTVADSARIRAVGSGHSFSAVADTRGDLVRLDALPPTVDLDPDASTVTVSAGLRYADVISVLERAGLALANLASLPHISVAGSVATGTHGSGDTQRCLAASVRALQLVGPEGDLVELSRDADPDLFPGAVVALGALGIVTRLTLDIEPSYAMAQRVRVAVPLDEVAAHFDAVSGAAHSVSVFTDWGGEEAQVWLKRRLDRPDSGWSGGRPADRPMNPVPGMPPEFSTEQLDVPGPWCERLPHFRPELTPGAGEELQSEYYLPRAAAPAAIAALRALGQRLAPALHIAEVRTVRADDLWLSPAHGRDSVTFHFTWVKDLARVQPLIADVEDALMPLGARPHWGKLTALAPREIAALYEQIGVFAQLARKYDPSGTFRNDFTDALLDTV

SEQ ID NO: 252 - protein, 423 aa, Streptomyces sp.
MLTTGAPAHNWAGNITYGAARVHRPASLDELRRIVSAASQVRTLGTGHSFNLIADTPGDLVRADGLPRRAEIDRERGTVTVSAGLRYAEVAEELHAEGFALANLASLPHITVAGSVATGTHGSGDGRQGLASAVAGLELVGPEGDLVTLSRNADPDRFPGAVVSLGALGVVTALTLDIEPAFEVAQWVHVDVPLDALADRFDEITGAAYSVSTFTDWHSGRGTVWLKRRTDRQGGGDEAADWLGGRPATAPWHPIPGMPAEFCTRQLGEPGPWHERLPHFRPEFTPSRGEELQSELFLPRAAAPAAFAALRGLGAELAPVLQVSEVRTVARDELWLSPAQGRDTVAVHFTWLKDTEAVLPVVAAVEERLLPLGARPHWGKVTAAAPADVAARFPRLPDFRRLVLDHDPAGRFRNDFVARLLGV

SEQ ID NO: 253 - protein, 407 aa, Asanoa ferruginea
MEWNWAGNHRYAAARVARPTSVGEAQDLVASADRVRALGTRHSFSGIADTPGLLLSTADLPVDLAVDEADGSVTVGGGARYGDVAVALDGHGRALATMASLPHISVAGAVATGTHGSGDRTGSLAAGVRAVEVIGPDGTLRTVRRGEPDFAGSVVALGTLGVVTRVTLDTEPSYVVRQAVYRDLPWSLVDTDFDALTGAAYSVSLFVDWAGDRIAQVWLKSRTDLPADLFGVVAADEPVHMLAGAPTAAVTGQQGVSGPWHERLPHFKLAFTPSRGEELQSEYLLPRAAVHEAFAALRPLAPRIASVLQISEIRTVAADDLWLSPAYGTDVVGVHFTWVKDIERVFALLPDIEAALLPLGARPHWGKCFAATEVAASYPRMADFRALRARVDPTGKFGNDLVDTLLG

SEQ ID NO: 254 - protein, 420 aa, Ktedonobacter sp.
MTEISVPERNWAGTYTYQAQKLHRPRTIEQVQQIVAKAANVHVLGSRHSFNGIADASELISLENLPAYVLVEHEAHTVSLGGGMTYGNLIKTLNDEGVALHTLASLPHISVAGAVATAAHGSGVTCGNLATAVAGLEMVTSSGEIIKASRGDPDFDGLVVGLGALGVVTRITLDVQPAYEMKQQVFEGLSWKALYDHFDEITSCGYSVSIFTRWGQTNDQVWVKSRMDEPDRVEGDLFGAIAATVDRHPIVGLDPTPCTPQLGRPGLWSNRLPHFRMGYTPSSGQEIQSEYLIPRRHAFAAIETLRALADRIQPLLQVSEIRRVAADRLWMSMNYEEDCVGIHFTWKREPDAVQEMVIQIEDALTPFEARPHWGKFFYANAAAIAPLYQRHSDFVRLVERLDPRGAFRNAWFKAHVLGGN

SEQ ID NO: 255 - protein, 412 aa, Amycolatopsis sp.
MGEANWAGNLTYGADAVTTPRTVGEVQEAVAAAAHVKALGSRHCFNDIADSPGGLLLDLRALDAGVEIGDGTVTVGGSARYGDFAQQLHDAGFALPNLASLPHITVAGSVATGTHGSGRRQPGLAAAVSGIELVTADGSLKTFTRADAEFPGLVVGLGAFGVVTRLTLDVVPAFDVRQDVFDALPWEAAYEQFDEIEDVGYSVSMFTNWVNDAIDQVWVKSRVDDFTERAGLFGAVPADGPRHPAHAAGVPADNCTPQRGVPGPWHARLPHFALAFTPSVGDELQSEYFVPYADAVAAIRAVREIGDLVAPLLLVSEIRAIAGDDLWLSPCHGGDRVALHFTWQPRQPEVEAVLPVLEERLAPFGARPHWGKLFHGVPGEYPRLAGFRALADRLDPQGKFRNPFLSRTVFGA

SEQ ID NO: 256 - protein, 407 aa, Amycolatopsis sp.
MRETNWAGNQIFTAERLLRPRTIEQVQEAVAGASAVKALGSRHCFNDIADCPGGVQLDLSELDVETELDAGSATVTVPAAARYGDIAVQVHEAGFALANLASLPHCTVAGTVATATHGSGLRNQSLASAVSGLELVTADGETRTYERHDGVVVGLGALGVVTRLTLDLVPSFELRQDVFDGLPWESAYEHFEEIQSAGYSVSMFTNWARDTIDQVWIKGTGQPDADFFGARAADGPRHPAHAAGIRADNCTRQLGVPGPWHERIPHFRLDFTPSIGNELQTEYFVPVRHAVAAMEALRGIGHRLAPVVLTSEIRTVAGDELWLSPFHGGDRMALHFTWLPDEDAVRGLLPVIEERLAPFGVRPHWGKLFHHAADYPKLADFRALADELDPDGKFRSPFVRRHVFGEL

SEQ ID NO: 257 - protein, 447 aa, Dyadobacter sp.
MNKRTFIKLSSALMTAPLLSPLSGWANGDKLRNWAGNLEYSTEKLDLGKNIQQVQTIVKKYPRLKVLGTRHCFNDIADTKDQFITVVGAEEQMDLDTKNKTVTVNGGLKYGQLAPYLHQKGFALHNLASLPHISVAGACATATHGSGEKNGNLATAVSAMEIVTADGELVKLNREKDGEKFNAAVVHLGALGVVTKVTLDVQPTFMMGQYVYENLPLSQLKAHFDEIESSGDSVSLFTNWATDDITEVWVKFKAGQGQPSGTKEFFGAKLATKNLHPIPELSAENCTEQMGVPGPWYERMPHFKMGFTPSSGKELQTEYFVPRRNAVDAILAISKMGSRISPHLFTSEVRTIAADNLWLSPCYKQDSVAIHFTWKQDWPAVSKLLPVIERELAPFNPRPHWGKLFTVSPGLLAKRYEKLPEFRELAAQMDPKGKFRNGFLNLNVFAN

SEQ ID NO: 258 - protein, 434 aa, Mucilaginibacter sp.
MASPLLSSFESFAQQPRLQNWSGNLTYSTGNVFYPKSVEEVQQLINKHDKIKALGTRHCFNTIADSKDNLLSTRNLNKVVSIDKQNHTVTVEGGIKYGELAPHLDKEGFALHNLASLPHISVAGSITTATHGSGVKNGNLSSAVVGLEIVKADGNIVHLSKTKDAAKLNAAVVGLGALGVITKVTLQIQPTYMMKQYVFTGLPMSELKQHFEKIVSAGYSVSLFTDWQSDHINEVWIKSRIGTDKDENLKEFYGAKAATKNLHPIIGLSAENCTEQMGVPGPWYERLPHFKMGFTPSSGKELQSEFFVPFDHAVEAIEAVARLGKQIGPHLFITEIRTIAADDLWMSPAHNQKSVAIHFTWKQETEAVMKLLPQIERELSPFKARPHWGKIFTIPAKTLAARYEKMDAFKVLVAEYDPHGKFRNQFLANELYTS

SEQ ID NO: 259 - protein, 418 aa, Promicromonospora sp.
MKNWAANLTYSSARVERPRTLAELAGIVAGEPRVRALGSRHSFCDVADTKGVHVQLDLLDDGRASLEVDPSTGVASVRAGLRYGEVAADLHAQGRALAAMASLPHISVAGAVATGTHGSGDGTRSLAGDVVGLELMTASGETLTLRRGDADFPGSVVALGALGVVTRVELATAPTFDVRQDVFTGLPWDALIENLDAVLGSAYSVSVFTSWFEPDVRMVWCKSRVADGAGVAPSLPVDLGATPATQPMHPLPDVAAVACTEQGGVPGPWFERLPHFRLDFTPSLGEELQSEYLLPRTAGPDAVRAVRALGDRLGPLLLTSEIRTIAGDDLWLSTTPEDSLALHFTWKQDWPAVRAVLPELEAALLPLGARPHWGKLFTVPVTALRGLYPRFDDFAELAERLDPTGKFRGGYVETLLAE

SEQ ID NO: 260 - protein, 416 aa, Arthrobacter sp.
MKNWAGNLEYSSADVRRPDSVTELADLVANSARVKALGSRHSFNRVADTDGVHVLLDALPQQVDLDSSRGTVRVSGGVSYGALCRTLEESGVAIHNLASLPHISVAGAVQTGTHGSGVNNPSLAGAVESIDLVRASGEQVTLSRADGDEFLASVVGVGALGIVTGLELAVRPSFRMRQRVLEDLPWDNALADFTAIVSSAYSVSLFTDYAGDRIDQVWLKALEEEQPLPRLFGATAALRPRHPLPDMSAENCTAQMDQAGPWLDRLPHFRHEFTPSNGDELQSEFILPLEHAPAALQAVRALAGKLAPLLFVSEIRTGAPDEFWLSPFYRQQSVALHFTWKPLQPEVEAFLPALEDALRPFGARPHWGKLFTPDGHDWEKLYPRFADFRSFADAHDPEGKFRNGLLDSILGVPARR

SEQ ID NO: 261 - protein, 415 aa, Unknown
  Description of Unknown: Paenarthrobacter histidinolovorans sequence
MKNWAGNLEYSSAGIQRPASVDELRELVAQATQIKALGSRHSFNTVADTPGTHVLLDALPQEIVLDREKGTVKVSGGISYGALGRSLEEQGYAIHNLASLPHISVAGAIQTGTHGSGVNNPSLAAAVVSVDLVRASGELVTLTADDDEFLASVVGVGALGIVTGLELAVRPSYEVRQRVLTDLSWDAALANFETIASSAYSVSFFTNYTGDTIAQVWVKALDTEAPLTDLFGATPATAALHPLPDMSAENCTEQLDVAGKWLDRLPHFRHEFTPSNGEELQSEFLLPLEHAPAALDAVRGLADKLAPLLFISEIRTIAADDFWLSPFYHQQSVALHFTWKPMQPDVEAVLPELEAALRPFGARPHWGKLFTPGEYDFPALYPRFEDFRALVKANDPTGKFRNALLDSVLGVTVTS

SEQ ID NO: 262 - protein, 415 aa, Curtobacterium luteum
MRSTASELNWSGTVTYTAERILRPTSVAEAAEIVARSPRVHGLGTRHSFNDVADSPGVLLDLTDIPTDLQVDAERRTATMGAGTRYGLVAPDLDRAGFALHNTGSLPHISIGGAIATGTHGSGTTLGSLSTAVRSLELIGPDGGLRTVHRGDPGFDGTVLHLGLFGIVTRVTLDVEPSYRMRQDTYGPVPWDVFTANVAGIHTAGYSVCSYTVFGDEISEVLVKSRVPDGANDVTVPDGLLGAPKRPGTPGDGHHTARDGSVGPWWDRLPHFPIESVPSVGSEVQSEHFVPLRHAAAALDAVRTMADRIHPHLHVCELRTMAADPFWLSPTQGEDVLCIAFTWRKHPAEVAALLPDLEALLAPYDGRPHWGKMSSLDGEAIAGLYPRLPAVRDLVRAADPDRVFGSAFAERVLGV

SEQ ID NO: 263 - protein, 416 aa, Nocardioides sp.
MRTETSLREAPGSTWARSYDYTARELVRPRSVEDVRDLVLREPRLRALGSRHSFTDLADTPGVLVSLEDLTGAPTLDGDVVRVPGGMRYGELAAWLQERGRALPNLASLPHISVAGAVATGTHGSGVGNGSLATSVTALEIVDGRGDLVRLEAGSPDFDGAVVGLGALGIVTHLELLTSPTYQIAQTVHDGLTYADLREHLTEILAAAYSVSIFTRWADEPDGSVGRVWVKSRSTTPEIPGTVPATQPRHVVPGLDPAPCTEQLGVPGPWHERLPHFRLEFQPSVGAELQSEYLVPLDRAQEAVDAVRSLADRVHPLLQVGEIRAVAADELWLSPAYGTDTLALHFTWNADPAGVRALLPDLEQRLPAGTRPHWGKLFATTDPGAGFPRWDDFKDLVRRFDPDRRFWNAWFDRVVG

SEQ ID NO: 264 - protein, 420 aa, Agreia bicolorata
MSHDSELNWAGTLEYSAADIIDATTIDEVSSLVAGAERIRALGTRHSFSDIADTDALLVTVTGIEPDFVLDEGARTVTVGAGTRYGILARFLEDHGWALHNMGSLPHISIAGAIATGTHGSGNGNGVLSTAISALELVVADGSRRVIRRGEPGFDGVVVGLGAFGVVVRVTLDIQPSFQVRQDVYRGLPWDVLLDDLEGVTSLGYSVSVFTDWVEETIANFWVKTRMDAGAEVVDEWRGAKRDVVSAGALWETSDDNLNAQGGVAGPWLERLPHFRPDRVPSAGDEIQTEYFVPRSQGADAIRALRALGAKIAPHLMITELRTAAADDLWLSMAYQRDSLIIHFTWKNEPEAVLALLPQIEEALAPFEARPHWGKLNTVDAATLSRLYPRLPEFRAMAAEWDPTGAFRNAYLDRLIFTGE

SEQ ID NO: 265 - protein, 417 aa, Microbacterium azadirachtae
MSIGTNWAGNVSYSARAIARPRSRDELVSALATPGPLRPLGSRHSFSAIADTDGTLVDLSAMPVVIDQVAPDAVRVSAGLRYGELGAELQRRGLALANLASLPHISVAGAVSTGTHGSGDAIGSLATAVRAITVAGPEGERVLRRGDPDFPGAVVSLGALGVIVELELDVEPAYDVAQTVHEGPAWDAVLAEFDRVTALGTSVSIFSRWTDRDRADQLWVKNRVGEPDPDRDLLARLGTTAATVPRHPILGVSAEACTPQLGEAGPWHERLPHFRLAFTPSAGEELQSEYLVPRRDAVRAIEAVRALADRIAPLLLVNEIRTVAADDLWLSSSYGEPAVGVHFTWRRDQPAVEALLPALEEALPDTARPHWGKLATLAPAEIRRRTPRWGDFVALADRMDPSGRFRNASLERLGLAR

SEQ ID NO: 266 - protein, 399 aa, Lentzea waywayandensis
MRTNWAGNVTFTAAQAVTPASAEDLRALVRGSSAVHVVGSGHSFSTIADTTGTLVSLSAMPEVFEVSGHTVRVSAGMTLADLSVRLEAAGLALHTLPSLPHITVAGAIVTATHGSGSRSLAGAVRSVEVLRGDGSVVELTSAGAPVSLGGLGVITTVTLDVVPSFQVAQTVYEHVAWTTLLIQLEQIFDGAYSVSAFVDWQGGATLWVKHRVGDEEFRYPGRPASEQAHPVPGQPGSRCTIQGGVPGPWHERLPHFRAEFTPSVGEELQTEYFVPRTRAVTALRALAEMSTVISPLVQACEIRTINGEPQWLSPAYDRDSLAIHFTWVPNTPAVLRLLPRLEEAIAPRPHWGKLFTVPPALLAARYPQWDAFRALLREHDPKGVFRNDFLTTYFGSASS

SEQ ID NO: 267 - protein, 434 aa, Geodermatophilus sp.
MAPVPSRGVPTTTHQTAPLRTWAGNLTYRAARVHRPRTVAEVQDVVARSERVKALGSRHCFNDIADTTADHVLLDDLDTGVELAEAADDGTGVLWVPAGMRYGELVGELAATGRALHNLASLPHITVVGATATGTHGSGNRNGSLSTSVAGLELVRSDGEAVVLGADDADLPGAVVHLGALGVVTRVALRFQPTFDVRNTVYVGMTWDRLFADLDAVADAAYSVSVFTDWRTVTSVWVKSRPEDPAVPEDFFGARAATEPTHMLPDTPVENLTEQLGVPGEWHERLPHFRADFTPSKGEELQSEWFVPRRHGRAACEALRGLADRVAPLLQVSEIRTVAADDLWLSPASGGDVMALHFTWLPDQAAVTAVLPEIEAALRPFGARPHWGKLFATDAAGLAGLYPRMTDFRALVRRFDPRGAFRNDYLDRTVAAFD

SEQ ID NO: 268 - protein, 415 aa, Microbacterium sp.
MPRNWAGTYEYTAPRIVEATSVDDVVRVLREPGRMRALGTRHSFTDLPDTTGTLVDVTGFAAEFELDEAAQTVIVPAGIRYGVLAVWLDDRGWALRNMGSLPHINVGGATATGTHGSGDANPVLSASVRALRYVGADAELHEVRRGDPDFNALVVGLGAYGIVVSLTLDVVPAFRARQDIYSGVSWEAALADWDALTSVGYSVSVFSRWEEPSLGFVWVKSRLDADDDAVPDAILDGARAQVEDSPLGVEDNVTELAVPGPWMLRLPHFRLDAEPSFGDEIQSEYFVARADAPAALNAVRALGDCIRPHLIWTELRTAAADELWLSPAYRRDVVIIHFTWHNHPDDVAAAVARVEAALEPFGARPHWGKLHGFDRAAIERVHPRLADARAVFERLDPDGRFSNAHLERLGVREPR

SEQ ID NO: 269 - protein, 431 aa, Cellulosimicrobium cellulans
MTTTPETSRPANWAGNLTYSSAAVEHPTTPGELADVVRRSRRVKALGSRHSFGDVADTTGTHVALDRYDDGRPPVEVDPATGVASVAAGLRYGDATRSVQAAGRALANLASLPHISVAGSVATATHGSGDAVGSLASAVVGLELVTGDGEARTLRRGDADLPGAVVALGALGVVTRVELETVPTFDVRQDVHVGLPWDAVTDHYDEITASAYSVSLFTDWGPDGVQQVWRKSRLAPGEAGTARAELFGATPARTPLHPLPGVDPVHCTTQLGEPGPWNERLPHFRLDFTPSNGAELQSEYLVPRARAQEAFAAMRDLGPRVTPLLQVGEIRTVAPDPAPLWLSPFDGPAVGIHLTWKPLADDVARVLRDVESALLPLGARPHWGKLSHALVHDPGSVAGLYPRFDDFGELVQRYDPQGRFLGGYVERLLAG

SEQ ID NO: 270 - protein, 418 aa, Rathayibacter rathayi
MTSRSNWAGTYEYRAAAIIEPESVEEVQRLVRENERVRALGSRHSFNSLPDTPGALLHLGRLAADPVIHAKASTVTVDGATRYGVLAAHLHSNGYALHNMGSLPHISVAGAIATGTHGSGDRNANLSSAVSALELVTADGSLRTIRRGEPGFEGVVVGLGSFGIVTRVTLDIQPTFNVRQDAFVDLPWERVLDDFDAITSSAYSVSLMTHWSSPTVEQLWLKTKVAAGSVADVDATHLGAVAASASLFAVSEGVDSNLNPFGGSVGPWSERLPHFRLDREPSAGDEIQSEYMVPRTNVREAIVALRAIGERIDDVLLITELRTMAADDQWLSPAEGRDSVGVHFTFKKDRAGVDAVLPAVEGALLPLGARPHWGKHFLAGADEIAPLYPHLDEWRALRSEWDPSGRFASDFLHTRLLG

SEQ ID NO: 271 - protein, 419 aa, Curtobacterium citreum
MAATTRTNWAGNVTYGASDLLSPTSVDEVRRVVAATPRLTALGSTHSFNRIADTDGVQVTVAGLPPVLDVDADRRVVRVAAGMTHAAVAAGLEARGWALANLASLPHISVAGAVATGTHGSGVRNPSLAHAVVGLEVVRASGDVAWVDASTPDDALDAHRVALGALGVVTAVELAIEPTFQVATTVHLDLPWDAVLEHFDAVVSDAYSVSLFTSFDDRGARQVWTKRRTDEPAPTVDLVALGARPADGPVHPGENDTAGVTEQGGVPGPWSERLPHFRSTFTPSTGAEIQAEYLIPASHAVAALEALRPLDPVFAPLLIAAEVRTIAADTAWLAPSSGRQSVGLHFTFRRDAEAVAAAVARIEDVLAPFDPRPHWGKVFAAGVERLHEAYPRLDDFAALARDLDPTGRFRNAYLARLLP

SEQ ID NO: 272 - protein, 424 aa, Curtobacterium sp.
MSDVIAEQRTRTNWAGNVTYRASGLARPTSVAALQELVASTPRLTALGSRHSFNTIADTDAVQVSLQDLPPVLDIDTSRRVVRVAAGMTHSQVAAGLEARGWALGNLASLPHISTAGAVATGTHGSGVRNPSLAQAVVGLDVVRASGAIEHVDASSPDGALDAHRVAIGALGVVTTVELAIEPTFEVATTVHLDLPWDAVSAHFDQVMSDAYSVSMFTSFDDRGARQVWVKHRVDEPSPTVDLVALGARPATGPVHPGENDPAGVTEQGGVPGPWAERLPHFRSSFTPSTGAEIQAEYLIPAASAVSALAALRPLESVFAPILIAAEVRTIAPDTAWLAPSSGRQSVGIHFTFRRDAAAVAAAVTRIEEALAPFDPRPHWGKVSGVSVERLHEAYPRLSDFAAVARDVDPTGRFRNAYLARVLS

SEQ ID NO: 273 - protein, 414 aa, Leifsonia sp.
MAEKNWAGNYEYQAERIARPDTIDELRDLVLSAPAVRALGSRHSFNDLADTPGLLISTAGLPGDIRIDEAARTVTAGGGVRYGDLARELQEARWALHNLASLPHISVAGAIATATHGSGDRNGNLSTAVAGLRILTGSGDVVELRRGDEGFEGAVVGLGALGVVTDVTLDIRPTYDARQRLFGGVPWEAVIDRFDEVTSAAYSVSLFTTWDEEAVSLAWLKELDGVEPLIEDDFFGAPALTEPRHMIQTMDVRNTTEQLGVVGPWSERLAHFRFEFTPSNGAEIQSEYLVPRARAVEAIEAVRALAPVVAPLLQISEIRTVAADDLWLSSAYQTDAVGLHFTWFRDQAGVEAVLPQLEAALLPLGARPHWGKLYVDRDRVVPSLYPRLADFAALAQRFDPAARFRNPFLTRLLP

SEQ ID NO: 274 - protein, 415 aa, Curtobacterium sp.
MRSTASELNWSGTVTYTAEQVLRPGSIDEAAEVVARSPRVHGLGTRHSFNDSADAPGVLLDLTAVPTDLVVDPERRTATLGAGTRYGVVAPDLDRAGFALHNMGSLPHISVGGAVATGTHGSGTTLGSLTTAVRSLELLGPDGSLRTVDRTDPAFPGTALHLGLFGIVARVTLDLEPTYRMRQDSYGPFPWSTFTDHVAAVHAAGYSVCAYTVFGDEISEALVKSRVPDGADDTAVPDDLFGAPRLPGSPGDGHHTARDGSVGPWWDRLPHFPIESVPSHGSEVQSEHFVPLRHAAAALDALRGLADRIQPHLHVCELRTMAADDLWLSPTQGEDVLCIAFTWQKHPEAVAALLPDLEARLAPFDGRPHWGKMSSLDGDAIAELYPRVADVRELIARADPDRTFASAFGERVLRA

SEQ ID NO: 275 - protein, 417 aa, Rhizobium sp.
MRRIPTTNWAASFSYGFRDCLYPSSMDAVCEIVARSPKIKAVGSGHSFNAIADGEVALSLTELPINPVIEGDGTQVSIGAHCTYGELALFLHRHHLAVHNLASLPHISIAGAIATATHGSGNGNGNLATAVSGLEIVSGDGRLVNVARGDADFPGMVVHLGALGVVTRVTLDVQPEFQVAQCVYEGLTWDKLLANLDEIMAAGYSVSVFTQWGQQAGSIWVKRTASANEWPAAIYGAARAMVKRHPISGLDAQNSTEQLGQYGRWSDRLPHFKMGFTPSSGEEIQSEFHLPREYGVAAIDALLSIRERFAHLVQAAEFRTVAADELWLSPQYHRDTLSIHFTWIRDQEAVNAAVEHIEQTLSRFMALPHWGKVFTRRHIGAKYEKLPEFVRLRDRMDPERTFSNLWLEDAILGSSGN

SEQ ID NO: 276 - protein, 428 aa, Unknown
  Description of Unknown: Mycolicibacterium phlei sequence
MSQWRNWSGQTSCAPDLVVRPRSEDELAFALRRSAGRTVRPIGSSHSFTELCVTDGVQVDISELRQLISVDEHDRVRVQAGINLHELNRKLLRRGLALPNLGDIDVQTLAGAAATGTHGTGLRFGNISQTIVSMRIMTADGTIHEIDSGDELRAARISLGALGVVTELTLQCVPAFRLYRRQSVHDLDTVLANLPTLLAETDHLELYLFPHTRRVLLLESTRTQEDRWPSHPVRHWVERDLVENGALGALMWTAGRLPVAAPYISRLVANLAGSNESQDESAAVFASPRKVKFTEMEYSLPLTNARDAIETVLATIEQNRHRVAFPLEVRFTQADDALLAPAYGRESVYLAVHQTVHGLWEPYFHDLEPILIGLGGRPHWGKRHTLTAGQLSERYPQWRTFQEVRARLDPGGVFSGRYLNRLLGPVSP

SEQ ID NO: 277 - protein, 427 aa, Plantibacter flavus
MTLERNWAGTHTFAAPRIVNATSIDEVRALVAEAARTGTRVRALGTRHSFTDLADSDGTLITVLDIPADPVFDEAAGAVTIGAGTRYGIAAAWLAEQGLAFHNMGSLPHISIGGAIATGTHGSGNDNGILSSAVSGLEYVDATGEVVHARRGDPGFDGLVVGLGAFGIVVRVTVDVQPAYRVRQDVYRDVPWDAVLADFEGVTGGAYSVSIFTNWLGDTVEQIWWKTRLAAGDDELPVVPESWLGVQRDSLTAGNLVETDPDNLTLQGGVPGDWWERLPHFRLESTPSNGDEIQTEYFIDRADGPAAITALRALGDRIAPLLLVTELRTAAPDKLWLSGAYHREMLAVHFTWRNLPEEVRAVLPAIEEALAPFGARPHWGKLNLLTAERIAEVVPRLADARDLFEELDPAGTFSNAHLERIGVRLPR

SEQ ID NO: 278 - protein, 416 aa, Couchioplanes caeruleus
MSDERFTNWAGSIVFGARRFHRPSTVAQVQELVAAGGSVKVLGSGHSFNRMADTRGDLVSLAGLPRIVEVGADRTSVRVDGGIRYGELAARLHAEGLALHTMASLPHISVAGAVATATHGSGWRHANLATAVSAIELVRGDGTAVTLRRGADGDAFAGAVVHLGALGVITALTLDVVPAYELRQYVYDDLPRAALQSHLPEILADGYSVSLFTTWSTPDMAAVWLKRRDPMPAGDFHGARRATAPRHPVPGMPARSSTDQSGEPGPWHTRLPHFRMEFTPSSGEELQSEYHVPRDRALEAIDALQAIGARVAPVLQVCELRTIAADELWLSPNYRRDTFALHFTWIADAGAVLPVVADVEEALAPLDARPHWGKIFTITPATVRARYDRFADFVALAREYDPEGVLRNPWLDDLLG

SEQ ID NO: 279 - protein, 425 aa, PaeniBacillus sp.
MSERMVNERNWAGNYKYGATELLVPESVSDVQEWVARSSRIKVLGSRHSFNGIADTAGSLISLQKLDRVVELDSANRKVTVEGGIRYGDLARYLHERGFALHNLASLPHITVAGAIATATHGSGVLHGNLAAAVQALEIVSADGEIATLSRDMPNAEEFRGAVVGLGGLGVVTKVALDIVPAFEMTQHVYEQLPLEQLELNVEAILSECYSVSLFTDWKASSFNQVWLKRRVGDPASSDQPEGFFHGAAAASGNRHPVPGHSGAVCSEQMGVAGPWHERLPHFRMDFTPSAGEELQSEYFVPRDKAIEALRAIDGIRELIAPLLYISEVRTIAADRLWMSPCFGQDSVGIHFTWKQDMEAVGRVLPVIEEALRPFGARPHWAKLFALPPGEVQPLYEKLPDFRRLLLRYDPTGKFRNEFLNRYIY

SEQ ID NO: 280 - protein, 416 aa, Microbacterium sp.
MSDGAGENWSRNIRYSAERFVAPRTVDELREVVAASDSVKALGSRHSFTRIADTAGTLVSTAELDLPIRVDAAQKRVRVGGGVRYGELAQELDRQGWALANLASLPHISVAGAVSTGTHGSGVGNRSLAAAVTGLELVTSTGELVQLTERDDALAGAVVGLGALGIVTTVELAIEPSYEVSQTVYENVPLEAVRKNFDVIAGSAYSVSFFTTFREDMYVDQVWRKERTDAAATPIPAALRDREASGARHPLPGVSAASCTVQGGKAGRWLDRLPHFKLEFTPSNGEELQSEFLLPFADAVAAFDAVRELKDRLKPVLQVCEVRTIAGDDLWLSPSSGRDSVAFHFTWTDDEAGVAEVLPELEAALAPFGARPHWGKVFTPRDPAGLYPRWAEFVQLQRALDPRGAFVNDYLRAVGL

SEQ ID NO: 281 - protein, 428 aa, Clavibacter sp.
MTDTIEQGTAGTNWAGNYAYRAREVHAPTSVEELRAIVRDAPRIRVLGSRHSFNDIADSDVLVSLAELPADLVIDRDASTATFSAGLAYGKLAELLGDEGLAIHNLASLPHISVAGAIATATHGSGIGNGNLGTAVAALELITADGETVTYRRGDDDFDGVVVGLGALGVVTRVTLDVEPAYLVRQRVFEGLSWDAFDENLEDVFGGAYSVSVFTRFGEATDQVWLKSRVQLGVDGQPEDEVVVADYFGAPAATEERHPILGIDPVNSTSQLGVVGLWSDRLSHFKMGFTPSDGEEIQSEFHVPLDRAVEAVRALREMGDRIRPILLVCELRAVAEDRLWLSPQYGQTTIGLHFTWKRDQEAVEALLVELEAAIRPFGARPHWGKVFTARAADIAPLYPRSGDFLELAERLDPAGKFRNAWFERSLRG

SEQ ID NO: 282 - protein, 419 aa, PaeniBacillus sp.
MGDQLNWAGNYRYSSLELLEPKNLEEVKDLVVNRKSIRVLGSRHSFNGIADTSGSHLSLRKMNRVIDLDREQNIVTVEGGIRYGDLCRYLNDHGCALHNLASLPHISVAGAVATATHGSGVHHASLASSVRAIELMKSDGEIAVLTRRVDPEFDGAVVGLGGLGVVTKLTLDVVPSFQVSQTVYERLPFSALDSDIEEILSAAYSVSLFTNWAEPIFNQVWVKRKLGTNGEDEAPSHFFGALPAPEKRHMVSGQSVVNCSEQLGAPGPWYERLPHFRMDFTPSAGNELQSEYFIPRRHALEAIHALGKLGDRIAPLLFISEIRTIASDTFWMSPCYYQDSVGLHFTWKPEWERVRELLPLIEHELEPFGVRPHWAKLFTMEPERLQARYERLADFRQLLLRYDPTGKFRNSFLEHYIMS

SEQ ID NO: 283 - protein, 415 aa, Curtobacterium sp.
MRSTTSELNWSGTVTYTAGRVVRPSSIDEAAQVVADADRVHGLGTRHSFNDVADTAGTLLDLTGIPTDLVVDTEHRTVTLGAGTRYGDVAADIDRAGFALHNTGSLPHISVGGAVATGTHGSGTTLGSLATAVRAFEVLGPDGSARTIDRTDPAFDGAVLHLGLLGIVTRVTLDVEPAYRMRQDVYGAIPWDTFTANVAAVHAAAYSVCAYTVFGDAITEVLVKSRVPEGAEDVPVPETLAGARRLPGTPGDDRRTARDGSVGPWWDRLPHFPIGSVPSHGSEVQSEHFVPLRHAAAALDALRGLADRIQPHLHVCELRTMAADDLWLSPTQGEDVLCIAFTWKKHPAEVAALLPDLESRLAAFDGRPHWGKMSSLDHAAIAGLYPRLADFRDLVARADPERTFASAFGERVLGT

SEQ ID NO: 284 - protein, 187 aa, Unknown
  Description of Unknown: Mycobacteroides abscessus sequence
MENGALGALMWAAGRLPAAAPWISKLVAALASSNESQDESAAVFASPRKVKFTEMEYSLPLTNAREAIETALTTIERDRHQVAFPLEVRFTQPDDALLAPAYGRESVYLAAHQTVHGPWESYFGGLEPILIGLGGRPHWGKRHTLTAEQLSERYPEWGTFQDLRARLDPGGTFSGGYLNRLLGPISP

SEQ ID NO: 285 - protein, 351 aa, Unknown
  Description of Unknown: Mycobacteroides abscessus sequence
MQAGISLHELNRTLLRHGLALPNLGDIDVQTLAGAAATGTHGTGLKFGNISQTILAMRVMTADGTIHEFDDGDELRAARISLGALGVVTEFTLQCVPAFRLHRSQSVHDLDTVLAELPTLLADTDHLELYLFPHTRRVLLLQSTRTDEEPWPRHPVKHWVERDLVENGALGALMWAAGRLPAAAPWISKLVAALASSNESRDESAAVFASPRKVKFTEMEYSLPLTNAREAIETALTTIERDRHQVAFPLEVRFTQPDDALLAPAYGRESVYLAAHQTVHGPWESYFGGLEPILIGLGGRPHWGKRHTLTAEQLSERYPEWGTFQDLRARLDPGGTFSGGYLNRLLGPISP

SEQ ID NO: 286 - protein, 202 aa, Unknown
  Description of Unknown: Mycobacteroides abscessus sequence
MLVRPRSEDELAFALRRSAGRTVRPIGSSHSFTQLCVTEDVQIDVSEMRRLISIDAQDRVRVQAGISLHELNRTLLRHGLALPNLGDIDVQTLAGAAATGTHGTGLKFGNISQTILSMRIMTADGTIHELDDGDALRAARISLGALGVVTEFTLQCVPAFRLHRSQSVHDLDTVLADLPTLLADTDHLELYLFPHTRRVLLL

SEQ ID NO: 287 - protein, 450 aa, Microbispora rosea
MTNWAGNITFRAAEVERPSSVEEVRALVARSEKARVLGSGHSFNHIADSPGALISLDGLPAEIEIDGGSSTVRVAANVRYGELGRRLHDKGYALPNLASLPHISVAGSCATGTHGSGDANGGLATSVRAIEMVTADGDLVTLSRDADGDRFAGAVVALGALGAVVAMTLDVVPSFDVRQRVFEGLPAEVLDDQFDAVMSAAYSVSLFTDWRTSRINQAWVKERVGAAGADPAEAAAVSGLVGDAAAGGLEGATAAGGLYGGEPGDGFFGATPADGPRHPVPGVSAVHCTAQMGVPGPWFERLPHFRPDFTPSSGEELQSEYMVPRRHAAAAFRALDAIRDRIAPVLQISEIRTIAADDLWLSPSQGRDTVAFHFTWIKDTAAVTPVLTAIEECLAPFGARPHWGKLFTLPADVLRTRYERLDEFAALARHYDPRGVFANEFVERYVLGLG

SEQ ID NO: 288 - protein, 437 aa, Bacillus anthracis
MLSIKGQKWRNWTGNVEGTPHYTMYPESIQDVVEVIELARKKGKKIRVVGSGHSFTPLVQTEEILVSLDEMKGIVNIDTEKMIAEVWAGTKLHELGKLLEEKGYAQENLGDIDSQSIAGAISTGTHGTGITFGSLSTQVIEITAVLSTGETIVCSEMENVEYWRAFQLSLGMLGIIVRIKLNIIRAYSLVYESEKQSLATVMNKLEEYKKNRHFEFFVFPYSDEVQVKVTNETTGKKSDLKWHKLKVELLENKMFSLLSKGCKWFPSISKGVSRLSAKAVPNTKIIGPSYEVFATSRAVPFYEMEYSVPSKYMQAVVEEISNLIEKKKYKVHFPIECRYVKRDDIWLSPAYGRDSAYIAVHMYKGMKYAAYFGEVEKIFLKYEGRPHWGKMHTLTYEKLQNIYPELHSFLKVRKLLDEAEMFSNPYTEKLFTIMKKS

SEQ ID NO: 289 - protein, 160 aa, Mycobacterium kansasii
MIPPIDDAPAAGRWVKAAHLVFGSGLRHRTGPIRELQQTAAAAATVRAVGGGDSGDSTVVTVGDLVLIDRLRAVLAIDPLQMSGCVDTGNRYGELTSQWYRGGLALENLSSMTHMSVAGAFFGGVHGPGNRDGSVSHAVTSVAVAHRSLAAQKRELRCNL

SEQ ID NO: 290 - protein, 536 aa, Vibrio sp.
MRIRTLALGATLISAALGTAFALQTSEPEREISNYQGTYTCHPEAVYDPQSIEGVQAIVKDALIRDKKVMTGNRKFASQIDAACAGDDQVQLTLKNMDKIVHFDAANKRVTVEAGMRFNDLNDFLREQGYAINMVTELAIFTVGGMLGSGTHGSTLEKPSNMLADYVTELKVVDGQGDVRVLNGDLLNAARVNLGVLGVVVEVTLAIEEAFKVKAEVTGYRDDSGLEDVVLDIARSNYSANIAWFPGLGRYTTTLYNPVPLETQGEAYNAQADVSDAEEFFFGLLFNAAHEFPGTGLQCLAAVARYNARAKSYFRDSNTGKKVSEPIGYSDQMQYFKCKDPNKCIWDRLPIALQEVAIDIERLPDWIRDVREIVAAHPRTCFPLNGIYFRFGQASDSYIGMSAGRETAFVGIEYTLRQEGKKEPKNYFVNLEIEQMSLRKYDARPHWGKNSVAIFEDMPSRFPMWQEFLQAKAELDPYNVFTNPFWERVSGDIPMDDYLTPGCNVRGECYCQTDDHCQSGTQCQAGLYFTDARICR

SEQ ID NO: 291 - protein, 464 aa, Streptococcus dysgalactiae
MPSHLSRRQLLQRAGALGAFAALAGNPALAELLRAPRLIPWRNWSGAQSCLPLAREAPKDLDELLRVIREAPGKIRPVGSGHSFSALVPTDGTLLSLAYFSGLLGHDGDTLQAEFGGGTPMSQMGAPLKEIGQALVNMADIDYQTLAGAIATSTHGTGVGFGSYSAQVRGLQLVSASGEVFDCDAARHPEVFDAARVSLGALGVVTRVRLQNRAAYRLRERQWIARTEELLEDVEKNTRENQHWEMLVVTHSDYALSIALNETEEPKTPPPDPEEEGGNQFVSLIEGLDKYVSDFPETRRTLLNSLRHFARFDERVDDSYAVYANVRNVRFNEMEYSVPAEHGPACLREILALIRGKDLRTWFPIEYRYVKADDIPLSMFEGRDSCSISVHQHYSMDHHNFFAAVEPIFWKYAGRPHWGKLHGLNARQLQTLYPRWREFAEVRQALDPDGKFLNAHLSSILGVT

SEQ ID NO: 292 - protein, 468 aa, Unknown
  Description of Unknown: Mycobacteroides franklinii sequence
MRPARNRASVGIVPITLGSAHAEGVNRLLRSYRAIPTTATVRLAKPTSNLFRARAKSTTPGLDTSGLTGVIDVDTVKRTADVAGMCTYEDLVEATLAHGLSPLVVPQLKTITLGGAVTGLGIESTSFRNGLPHESVAEMDILTGAGEIITAAPDRHPDLYRGFPNSYGTLGYSVRLRIELEPIKPFVTLRHIRFHNVDELVTAMDTVVDSATYQGEPVDYVDGVVFSTDESYLSLGAQTATPGPVSDYTGQRIYYRSIQHEDGISNDRLTIHDYLWRWDTDWFWCSRAFGAQNPRIRRLWPRKYRRSSVYWKMIGLDQRYDIADRIERFNGRPARERVVQDVEVPIAQTTEFLRWFLDEIPIEPVWLCPLRLRDDQGWPLYPIRSRQTYVNIGFWSSVPVGPVEGATNRLIERKVGELGGHKSLYSDSFYSRDEFESQYGGEHYRTLKKTYDPDNRLLDLYAKAVRRQ

SEQ ID NO: 293 - protein, 453 aa, Kocuria rosea
MSEVSLPDALPGETGTREWATWGRTHSVTPRHVLRPTSVPELAEGVAAAVRRGLGVRAVGSGCSFSALPLAPDVMVDLSGLSGLPAVDRENQRVTVLAGTTIRDLNQELDAHGLAVTNLPDSDWQTVAGAVSTGTHGTGLAFGSLSQQVVALSLVTADGELVECSAEQRPELFQAARVGLGAMGVLASVTLVCEPTFRLHAAELKEPLGQLVDTLGSRMAGADHFEFFWTPGTATAQTRILTRLHKLPDSYTRPGSPVARTVRRLDDALLRNTLTAGLNQLATALPRSTPGLNRLDALTNSPRQYSDLSFRVFTVPRRTRFVSSEYALPVEELVVAFRELQTLIERRDYSFSLPVDVRCAAAEDAWLAPAHGRETGWIALRQYWRRYDPKVFAAAEEIFVAHGGRPHWGTVHTQDAEYLRSVYPRFQDFLDARASVDPDGVFLNDHVRGLLGL

SEQ ID NO: 294 - protein, 346 aa, Streptomyces sp.
MNSMVTVSAGMRYADIAPEINRAGFALANLAALPHVSVAGACATGTHGSGDTQRCLAAAVAGIQWIGPDGNLNELQRAADPEVFAGSVVALGALGIVTRLTLEIEPAFDLRQRVRQGISLDDVANRFDEIFSAAYSASVFTDWHSGSAMVWLKQRTDQPTVHLQVGEPLSRPVHPTPGISSEACTQQLGVVGPWHERLPHFRAESPMWTGNELQSEYFLPRDQAGSAFSAIREIADLLAPILLVAEVRTVRADDLWLSPAYGRDSVTFHFTWIKNTVQVLPILQVIEERLSRFSARPHWGKITAMAPSDVTAHYQRADGFENLLRTYDPDGKFRNQFIEDHFPGVR

SEQ ID NO: 295 - protein, 221 aa, Streptomyces sp.
ATFEAVMAAAYSVSLFTDWRAPGFRQVWLKRRTDRPLDGFPYAAPAAEKMHPVPGMPAVNCTEQFGVPGPWHERLPHFRAEFTPSSGAELQSEYLMPREHALAALHAMDAIRETLAPVLQTCEIRTVAADAQWLSPAYGRDTVAAHFTWVEDTAAVLPVVRRLEEALAPFAARPHWGKVFTVPAGELRALYPRLADFGALAGALDPAGKFTNAFVRGVLAG

SEQ ID NO: 296 - protein, 419 aa, Microbacterium hydrocarbonoxydans
MTTERNWAGNVTYRASSIEHPASTDELQGLLARGGAVRLLGSRHCFSDIADTDGVLIVLDRMPRMFDVNDARDAVRVSGGLRYGDIAPLLAAEGLALANLASLPHISVAGAVATGTHGSGDGIGSLASAVRALTIVTPAGEVRTLARGDADFDGAVVSLGALGAVVDLTLDVEPTYEVAQHVFEHPSWDAILADFDEVTSIGTSVSIFSRWERTDIADQIWVKQRQPEARENTRADLFARLGAEPAESKRHPILGVDPVACTEQLGEPGPWFERLAHFKLEFTPSAGAEIQSEYLVPRADAVAAIQAVRTLAGQIAPLLLVNEIRTVAADELWLSSSQGTDAVGIHFTWKPDEAAVREFLPTLEALLPATARPHWGKVFTLDPAEVRSRYARWDDFAALAARFDPERRLVNPYLERLGL

SEQ ID NO: 297 - protein, 415 aa, Microbacterium sp.
MIQTREAGATWSGNHRYRATEVLLPSDFDELAEVVASADSLRVQATRHTFNDVADCDASLVSLERLPTRIEMIDDRVRVEGLVTFAQLAPVIEAEGRALHNLGSLPHISVAGATATGTHGSGVRNGNLSSAVRALEIMDAEGHTQRIDQTHEWFPAAAVGIGAFGVVTAVELQTEPTYEVTQQAYTGVSWSDIAGDPERVFGGSRSVSVFTTWGDPAHDLIWAKSDDGDPAWVEELGGQPVGDDIHLGRIRTVDNTTPRATPGPWHTRLPHFRADALPSDGDEIQSEYFVPFASAREALAAVRAIAPAFDAHLLVTELRTVAADELWLSPAYQRDVLAIHFTWRNDTAGVLGVLPAIEAALAPFEVRPHWGKAFTMPGADVRATLERVDEFVGAARAADPRGVFRNDFLRRTLGL

SEQ ID NO: 298 - protein, 446 aa, Mucilaginibacter sp.
MKRKTFIQLSTTLMATPLLSSLEGWAQAPRLKNWAGNLTYSTNHVFYPKSVQEVQQLVKKYDKLKVLGTRHCFNTIADSKDNLLSTKELNKVISLDKKAHTVTVEGGIKYGELAPYLHKEGFALNNLASLPHISVAGSITTATHGSGVKNGNLSSAVTALEIVKADGSIVHLSKAANPEKLNAAVVGLGALGVVTKVTLQIEPTFMMQQRVFTQMPMAQVKQNFEKIVSAGYSVSLFTDWQHDSINEVWIKSRIGRDKDHNGPEFYGAKAATKNVHPIIALSAENCTEQMGVPGPWYERLPHFKMGFTPSSGKELQSEYFVPMNHAVEAITAIARLGKQIGPHLFITEIRTIAADQLWMSPCHNQTSVTIHFTWKQETAAVMKLLPLIEKELSPFNARPHWGKIFTMAPKVLESRYEKLNDFKKLVAEFDPKGKFRNDFLSKEIYG

SEQ ID NO: 299 - protein, 415 aa, Curtobacterium sp.
MRSTARELNWSGTVTYSAGRVERPRSIDEAAEIVAREPGVHGLGTRHSFNDVADAPGVLLDLSDVPTDLVVDTAAGTATMGAGTRYGVVAPELDRAGVALHNTGSLPHISLGGAIATGTHGSGTALGSLSTAVRTLQLLGPDGSRRTLRRGDPDFDGAVLHLGLLGVVTRVEVDVEPTYRMRQDSYGPLPWDVYVATVAAVHASAYSVCAYTVFGDEVGEVLLKSRVPDGADDVPVPVDLVGAPRLPGRPADGHHTARDGSVGPWWDRLPHFPIDTVPSHGSEVQSEHFVPLRHAAPALEAVRTMAARIRPHLHVCELRTMAADPFWLSPTQGEDVLCIAFTWQKHPEAVAALLPDLEALLAPFGGRPHWGKMSSLDAETVERLWPRLPEFRRLVAAADPQRKFASAFGERVLRT

SEQ ID NO: 300 - protein, 416 aa, Rhizobium sp.
MTQVPAANWAESFHYGFKDCHYPSSVEEVRAIVARSAAVKTLGSRHSFNAIVDGSSAMSLEHLPINPVVDSSGNQVSVAGHCTYGELALFLQRHQLAIHNLASLPHISIAGAIATATHGSGDKNGNLATAVSGLEFVAGDGSLVKVKRGDADFEGMVVHLGALGVVTRVTLDVQPEFQVAQHVYEGLSWDALLSNLDAIMAAAYSVSVFTQWGERAGAVWLKETEKSGNHPDALHGAVNADIKRHPIIGLDAENATEQLGAFGRWSDRLPHFKMGFTPSSGAEIQSEYHVPRKHGAAAVEALLSIRSKFAHLVQSGELRTVAADSLWLSPQFERDTLSIHFTWVRDQAAVDAAAAQIEQALAPFSPLPHWGKVFTRQHVGRNYAKLPDFARLRGRMDPERKFSNPWLEEVVFGAKA

SEQ ID NO: 301 - protein, 421 aa, Frigoribacterium sp.
MHNWAENVEYTTTDLRTPASVDELRDVVASSRRVKAIGSRHSFNRVADTDGVLVSTEGLGLPIELDQAAGTVRVGAGTTHAVLARELQAHGRALPNLASLPHISVAGAVQTGTHGSGVRNPALSASVAAVEIVRADGSLDVVRRGDDAFGASVVGLGALGVVTALVLDTVPTFDVVQTVHHDLPWAAALENLGALMAHAYSVSLFTRYTGDVVGQVWAKARVGDAPLATPLDLVALGARPASEAVHMLPDTAADAVTPQLGVPGPWLDRLPHFRAEFTPSAGEEIQSEYLVPAEHAPAAVEALRALGESLADVIFVSEIRSIAADDAWLSPSGGRDSIAFHFTWRRDTEAVLAVLPSVEEALAPFDARPHWGKVAGLDHGVLRRRYPRLDDFAAHATAVDPDGRFRNAHLDHLVFGGTARA

SEQ ID NO: 302 - protein, 402 aa, Nonomuraea polychroma
MTLTNWAGNTAFRARDVHHPTSLDELQRLVAASPQVRALGSGHSFNDVADTTGDLVILDRMPDAVEIDSAAAQVRVPARTTYARLAPIVHEAGFALANMASLPHISVAGSVATGTHGSGDTVQGLAAAVASLDLVTADGSLLTLSRGDADFPGAVVALGALGVVTSLTLDLIPAFEVRQYVREGLTVDALADFDEIMSSGYSVSLFTDWRDTRVWLKRTEELTSPGWYGTRPADAPRHPLPTMPADSCTLQLGVPGPWHERLPHFRPDFEPSGAGDELQSELIVPREHAVKALRELYTIGDRIRPVLQISEVRTIAADDLWLSPFRGRDSVGIHFTWVKDPAGVRPVLELVEETLAPFDPRPHWGKLFTRWPSCPDRFRSLARRLDPAGKFANDFTRILLGE

SEQ ID NO: 303 - protein, 467 aa, Edaphobacter sp.
MNKRQFLKGSCSLLTGTMLSRFVSAAEQQTAHQTADQSALQAAAHQTAPRTNWAGNLTFHTDTLYQPKTTDEVQHIVKSCDKLRALGRGHSFNAIADSTHAQISLKQLDSIDIDAKARTATVGAGVTYGKLAPILDAQGFAVPNLASLPHVSVIGACATATHGSGSNNGNLATIVSGLELVTADGTLHTLSRAKGGDRFLGQVVNLGGLGVVTKTTLNLQPTFQVAQVVYENLSFSQLEHHLEEIYLSGYSVSLFTNWQNHQAAEVWVKRRLEPGATSVQFAPEFFGAKQATQKLHPVAGHSAESCTEQFGVPGPWYERLPHFKLNFTPSSGAEIQTEYFVPREHAYEAILAVEQLRDRITPHLYITELRTIAADDLWLSMAYQRPSLAIHFTWKPENDAVQALLPLIEEKLAPFNGRPHWAKVNTIPPATLQRLYPKMPDYKALLTQYDPQGKFRNQFLNTNLFGA

SEQ ID NO: 304 - protein, 385 aa, Rhizobium sp.
MARSPKIKTLGSGHSFNAIADGEVALSLADLPINPLVESDGTQVSVAGHCTYGELALFLHRHRLAVHNLASLPHISIAGAIATATHGSGNRNGNLATAVSGLEIVAGDGRLMKVARGDADFAGMVVHLGALGVVTRVTLDVQPEFQVAQCVYDGLAWDKLLANLDEIMALGYSVSVFTQWGQQVGSIWVKRTASDDKWPADIHGATRATVNRHPISGLDAQNSTEQLGQYGRWSDRLPHFKMGFTPSNGEEIQSEFHIPREYGAASIDALLSIREKFAHLVQAAEFRTVAADELWLSPQYRRDTLSIHFTWTRDQDAVNAAARHIEQALSPFAPLPHWGKVFTGHHVGGKYEKLAEFARLRDRMDPERTFSNPWLETVVFGSGEG

SEQ ID NO: 305 - protein, 516 aa, Unknown
  Description of Unknown: Aspergillus arachidicola sequence
MSLLNSASMIGLLCLTSALVCQAQSNDYRPVYHFTPDENWMNEPNGLIKIGSTWHLFYQHNPTANVWGNLNWGHATSTDLLHWTHQALAITSENGVEAFTGTAYYDIDNTSGLGTSANPPYLAWFTGYTVANQSQDQRLAFSVDNGATWTKFQGNPIISTTQEAPHDITGGLESRDPKVFFHSPSGKWVMVLAHGGQDKMTFWTSTDTKQWTWQSDLESSSISGMSSAITGWEVPDMFQLPIAGTGESTWVLIITPAQGSPAGGNGVLALTGSFDGATFTADPVRNETMWLDYGRDFDGALSWVNVPSSDGRRIIAAVMNSYGSNPPTTTWKGMLSFPRTLSLKTIGNEQYFVQQPIAELDSVGSTVLQIQNQTIAPGQTLLSSVYGTALDIRIAFRPAVSSILSLAVRKGASEQTVIKYTQSTSTLSVDRTASGDISYDPAAGGVHDAKLQVEDTGIVHIRALIDTCSVEVFGGQGEAVISDLIFPSDSSDGLALDVTGGNVAIESVEVRKISLA

SEQ ID NO: 306 - protein, 516 aa, Unknown
  Description of Unknown: Aspergillus alliaceus sequence
MNILKITVTLRALSVAWALVSQVVADDFRPAFHFAPDKNWMNEPNGLIKIGSTWHLFYQHNPTANVWGNINWGHATSSDLLHWAYLPVAIENENGIEAFTGTSYYDANNTSGLGTSDNPPYLAWFTGYFPSNGTQDQRLAFSLDLGTTYVKLPGNPVIASVQEAPHDVTGGLESRDPKVFFHSPSGKWVMVLAHGGQNKMTFWSSTDSKSWIWESDLLSTQIKGFPSSITGWEVPDMFELPIHGTNETTWVLMFTPAQGSPAGGNGVVALTGSFDGKTFVADPVDSSTLWLDYGRDFDGALSWENIPVSDGRRIIAAVMNSYGSNPPTNTWKGMLSFPRSLTLKQMGSKRYFLQHPISELRTIGNSLISIQNRTIEPGQTLLSSTHGISLDIRVAFLLDPGATLSLAVRKAGSEQTIIRYSQANSTLSVDRRASGDNTYDPAAGGIHNAQLVLDDTELVNIRVLVDTCSVEVFGGQGEGVISDLIFPSSTSNGLLLEAIGGKATLQSVEIYSVSLD

SEQ ID NO: 307 - protein, 506 aa, Unknown
  Description of Unknown: Aspergillus alliaceus sequence
MLLALAFALATHVWAEDFRPVYHFVPEKNWMNEPNGLIKIKSTWHLFYQHNPTANVWGNLNWGHATSSDLVHWTHEPLAITSENGVEAFTGTSYFDADNISGLGSSTSPPYLAYYTGYFPSNGTQDQRLAFSVDDGVTWTKFQGNPIISAAQESPHDVTGGLETRDPKVFFHQPSGKWVMVLAHGGQDKLTFWTSSDAKTWTWKSDLSASQIEGLPSGITGWEVPDMFQLPIEGTDETTWVLIITPAQGSPAGGNGVLALTGSFDGSTFKADPVDPSTLWLDYGRDFDGALSWENVPAADGRRILASVMNSYGANPPTNTWKGMLSFPRTLILKETASKRYFLQQPVTELAPVGSPLATIQNQTITPGQALLSSIHGTALDIKLAFTVSDGAKLSLAVRKADSEQTIIQYAQTNSSLSVDRTASGDVSYDPAAGGVHSVSLKPDGSGVIHLRVLVDTCSVEVFGGEGEVVISDLIFPSETSDGLSLEVTEGTADLYSVEVRGISLN

SEQ ID NO: 308 - protein, 506 aa, Unknown
  Description of Unknown: Penicillium flavigenum sequence
MIVSTLLLLVTQALASDYRPLFHFVPEKNWMNEPNGLIKIESVWHLFFQHNPTANVWGNLNWGHATSTDLLHWTHEPIAITSENGVEAFTGTSYYDSENTSGLGTSQSPPYLAWYTGYFPSNGTQDQRLAYSVDDGVTWTKFAGNPIISATQEAPHDITGGLETRDPKVFFHEASGKWVMILAHGGQDKITFWTSTDAKQWTWVSDLGTAQVSGLSSAITGWEVPDMFQLPIEGTDETTWVLILTPAKGSPAGGNGVFALTGSFDGKTFQPDPVDTANLWLDYGRDFDGAMSWENVPKSDGRRILAAISNSYGASPPTNTWKGMLSFPRTLGLQQTGSGRSFVQWPVSELLTAGSTLATIQNQTITPGQVLLSSVVGTALDIELAFTAPADTVLSLAVRKAGSQQTVIQYKQSTATLSVDRTASGDTSYDAAAGGVHSAPLQPDASGVVRIRVLVDTCSVEVFGGKGEVVISDLIFPDEAADGLALQVDGGSVMLQSVVVRKISLE

SEQ ID NO: 309 - protein, 508 aa, Unknown
  Description of Unknown: Aspergillus rugulosus sequence
MFLHILCLLAGQALADDYRPVFHFVPEKNWMNEPNGLIKIGSTWHLFYQHNPTANVWGNLNWGHATSSDLVHWTHEPLAITSENGIEAFTGTSYYDAENTSGLGTSDNPPYLAWYTGYFPSNGTQDQRLAFSIDAGETWTKFEGNPVISAAQEAPHDATGGLETRDPKVFFHADSGKWIMVLAHGGQNKMSFWTSVDAKRWSWASDLTSTQVPGLPSAVKGWEVPDMFEVPVHGTDKTTWVLIFTPAEGSPAGGNGVLALTGSFDGTVFHPNPVNVSTLWLDYGRDFDGALSWENLPDSDGHRILAAISNSYGANPPTNTWKGMLSFPRTLSLHQSQTGQYFLQQPVSNLDTVSTPLVSVKNQTIAPGQVLLSSVRGTALDIRIAFSANAGTVLSLAVRKAGSQETVIQYRQSDATLSVDRTTSGLTSYDPAAGGVHTAPLRPDASGVVQIRALVDTCSVEVFGGQGEVVISDLIFPDETSDGLALQVIGGTAVLRSLEKFPRLGAVL

SEQ ID NO: 310 - protein, 506 aa, Unknown
  Description of Unknown: Aspergillus calidoustus sequence
MLLPVLALLAVPALADDYRPVYHFVPEQNWMNEPNGLIKIDSTWHLFYQHNPTANIWGNLNWGHATSNDLVHWTHQPLAITAENGVEAFTGTAYYDSENTSGLGTAGSPPYLAYFTGYFPSNGTQDQRLAYSVDAGDTWTKYPGNPIISAAQESPHDETGGLETRDPKVFFHEPSGNWVMVLAHGGQDKLTFWTSPDGLKWKWVSGLTADQVAGLPSGVTGWEVPDMFQLPIEGTDETTWVLIVTPAQGSPAGGNGVFALTGSFDGTSFQPDDVDTSTLWLDHGRDFDGALSWENVEASDGRRILAAIANSYGASPPTNTWKGMLSFPRTLALHQSGSRKYFVQQPVSELGTVSSSLATIQNQTITPGQVLLSSVHGTALDMQLTFTPNTDSVLELAVRKAGSQETIIRYDSSNETLAVDRTASGDTSYDPAAGGVHTAPLVPDASGVVRIRVLVDTCSVEVFGGDGEVVISDLIFPDEAADGLALQVIGGSAALRSVQVNGIALD

SEQ ID NO: 311 - protein, 1398 aa, Unknown
  Description of Unknown: Penicillium sp. sequence
MYICRVATPICHVLTLGLFVLQIATAQTYTELYRPQYHFTPAQNWMNDPNGLLYYKGIYHLYFQYNPSGITWGDMSWGHATSTDLTDWHQQPIALLARGYPGTVTEMFFSGSVVVDTQNTSGFGVNGTVPLVAMYTSYYPQSQTLPSQQSVQGGQQAQSIAYSLDDGYTWTTYDVGNPVIAVPPARYSNQVNNFRDPFIFWHDDSEKWVAVVSLAQLHTLLIYTSPNLKVWTQVSEFGPVGAIGGVWECPSIFPLPVDGDETNIKWIAQIGLNPGGPPGTTGSGVQYVVGTFNGTAFVADTVPNGAITFQDFEGNGTYAQLGWTATGGLVGASPAQGTLPGQQAVTGYNGNRLVNTFLNGDATTGTITSPPFNITHRNINFLIGGGKFPNQECINLVIGGQVVLTATGNNNEALVPATWDVSSYVGQSAVIEIVDSLTGGWGHINIDDITFSDPANTVFASFEGGGTFASLGWAATGGLVGARPAAGTLSGQNPVTGYVGSYLVNTFLNGDATTGTLSTSFTIAHRNISFLIGGGNFPNQECINLVINGQVVRTATGANSEQLAWQSWDVTGFIGQNATLQIVDQLTGGWGHILIDQITFSDSTIEDNGANWSDWGPDFYAATSFNGLNSTERIGISWMNNWQYGANIPTNPWRSAMSIPRTLSLSTINGKQTLVQQPTENWASLETLGSYTNSWTSVPQGNQLLQLSGKALDITLTFADRSTAVASPQFGIILRATSDLTQQTRVGYDFSTKQLFVDRTKSGNVGFDGTFPTVYYAPLTPASGGTVTLRILLDWSSVEVFGGQGEATLTTQIFPSDAGTEVLLFSSGGNTTGVSLSALSIGSSWQHSTVSGTSTTTLASSTKSGTVSSSTARTTFSIVTLTSTTSSSMVSSTTSSSATPASTAAYDHRPTYHFCPQEYWMNEPNGLIKIGSTWHLFFQHNPDANVWGDMSWGHASSTDLLHWQYLPVALPVDNGIQSFTGTSWFDANNTSGLGSATNPPYLAFFTGYFPSSGVQDQRLAYSLDQGGTYTKIPGNPIISQTQEAPHDVTGGLEARDPKVFFYGPTGEWVMILAHGGQDKVTFWTSPDAIHWTWQSDLTASEIPGFPSGATGWEVPDFFQLPIEGTPQSIWVLIFTPANGSPPGGNGVVAVTGSFNGTVFTANPVNSATLWLDYGRDWDGALSWVNVPSSDGRKILAAVMNSYGANPPTNTWKGMLSFPRTLKVQQLNGVYTFFQQPVVELDTVSTSLTLLENQTLAPGQQLLSTIHGKALDVRISSIPAAGSTLSLAVRVGGTDQTVIRYVQSSGQLQVDRTSSGNMSYDPAAGGVHTVTLSPDVNGVVEIRVLVDECSVEVFGGQGQVVISDLIFPSNTSDGLYLSTAGGNVVLNSVDVRAIGCTMC

SEQ ID NO: 312 - protein, 522 aa, Unknown
  Description of Unknown: Penicillium subrubescens sequence
MMTTVTRQPCKRHLILTFLFVSCSFSYLAVADDFRPTYHFCPDVNWMNEPNGLIRIDLDWHLFYQHNPDGNYWGNLSWGHATSTDLLHWNYQPIAISSADGIQAFTGTSYYDISNSSGLGTPDGLPYLAFFTGYFPSNRVQDQRLAYSLDNGTTYTKFQGNPIISQQQESPHDSTGGLESRDPKVFFHESTGQWVMVLAHGGQNKVTFWTSPDTKSWTWQSDFTSSSISGLPSGITGWEVPDFFELPIQGTASSTAWVLMLTPANGSPAGGNGVLAFTGSFDGRVFTANLVDPNNLWLDYGRDWDGAMSWENVPASDGRRVVAAVMNSYGTNPPTSTWKGMLSFPRTLTVQQFNGTLRFLQQPVIELHTVSGLLVDIANKTISPGQTLLSTTNGIALDITMSFIPTAGSTLSLAVRKGGSEQTFVNYTQSSAQMSVDRNLSGDISYDPNAGGVHVAKLQPDATGAVQLRVLVDTCSLEVYGGQGEAVISDLIFPSSTSDGLALTASGGDLYLQSVQVREVAL

SEQ ID NO: 313 - protein, 1638 aa, Unknown
  Description of Unknown: Penicillium subrubescens sequence
MASRLVTALTLGLHFFQAAFAQTYDELYRPQYHFTPPVNWMNDPNGLLYHNGLYHLYYQYNPGGNTWGAMSWGHATSTDLTHWNHQPIALLARGYPGDITEMFFSGSAVADTQNTSGFGTSGKVPFVAMYTSYYPASQNLPSGKLVNGGQQAQSIAYSLDEGMTWTTYDAANPVILNPPTPYTDQWRDFRDPFLFWHEASQKWISVVSLAQLHKLLIYTSPNLKDWTYASEFGPWNAVGGVWECPSLFPLAVDGDDANTKWIMQIGLNPGGPPGVTGSGTQYIVGTFDGTKFVADPNSPLSAHTSTSTTTSASVTTSASITTSASITTSASITTSASITTSASITTSASITTSASITTSASITTSASITTSASITTSASITPTTTKATATATATGDIIFQDFEGAGDFASRGWVATGGLLGAAPAKGTLAGQQTVTGYAGSQLVNTFLSGDSTTGTLTSPAFTISLPYVNFLIGGGNAPGTECINLKVQGQVVRTATGANVEQLAPTTWNVTDLMGQTAVLEIVDQQTGGWGHILIDQITLTGNPAGDIVFQDFEGAGNFASRGWVATGGLLGAAPAKGTLAGQQTVTGYAGSQLVNTFLSGDSTTGTLTSPAFTISLPYVNFLIGGGNAPGTECINLKVQGQVVRTATGANVEQLAPTTWNVTDLMGQTAVLEIVDQQTGGWGHILIDQITFTGSTSTNNLHKRSVSSVTWDFNGTSTFADYGWTPSGDFVGKGPAQGTLAGQQVVTGNMGNFVNTFLSGDGTTGTLTSPAFTITQKKINFLIGGGNSPGMECINLKIQGQVVRTATGANAEQLVPTTWDVTDLIGQSAVIEIVDLSTTGWGHILIDEISFSNISIVPYGPNWLDYGPDFYAATTFNGLSSTNRIDIAWMNNWQYASAIPTSPWRSMLSVARKLSLKTIDDRPRLIQQPEANWTSLQTTTYSTSFDTVAEGNQLVQLSGKLLDITVAFSDRVAASSSSQFGIILRATSDLAQQTRIGYDFSTKRLFVDRTKSGNVGFDGTFPSTYFAPLAPSGDGRVTMRILLDRSSVEVFGGQGEVTISAQIFPQDNGVDVRLFSGGGSTNAITIDAIVLDSVYDSSTPSASLSTSSTSIGTVTTTFSNTVTTSVGNTLTTSTRTVTSASPTSTAPYDFRPVFHFVPEENWMNEPNGLIKIDSTWHLFFQHNPTGNFWGNLSWGHATSIDLVSWDYKPVAISSADGIQAFTGTSYFDAMNLSGLGTSSNQPYLAFYTGYAPSSGIQDQRLAYSLDQGATWMKYQGNPIISQSQEAPHDITQGLEIRDPKVFYHSPTSRWVMILAHGGQNKLTFWTSTDAKNWTWRSNFAASNILGFPSGVNGWEVPDFFELRIQGTTQYKWVLIVTPAAGSPAGGNGVFALTGSFDGEVFTADAVDPTTLWLDYGRDWDGVMSWENVPASDGRRVLAAVMNSYGGNPPTNTWKGMLSFPRTLELKQLNGKLRFLQLPVSELDAVGASVATITNQTLAPGQTLLSNIHSRSLDILITFVPAQGSTLSLSVRKGGSQQTVIEYVQSNNQLSVDRNESGNTSYDPAAGGVHSAALHADENGKVQLRVLVDECSIEVYGGQGEAVISDLIFPDFSSDGLALSTSQGNVVLESVDVRSILL

SEQ ID NO: 314 - protein, 1414 aa, Unknown
  Description of Unknown: Penicillium flavigenum sequence
MPFRLALVLTLGLSLFQAAFAQTYNELYRPQYHFTPAKNWMNDPNGLLYYNGVYHLYYQYNPGGNTWGAMSWGHATSTDLTRWNHQPVALLARGYPGDITEMFFSGSAVADTENTSGFGTNGKVPFVAMYTSYYPSSRNLPSGKSVNGGQQAQSIAYSLDEGITWTTYDAANPVILNPPAPYADQWRDFRDPFVFWHEASQKWISVVSLAQLHKVLIYTSPNLKDWTFASEFGPWNAVGGVWECPSIFPLAVDGDDANTKWVMQIGLNPGGPPGVTGSGTQYIVGTFDGTKFVADSNSPPPAPTSTSTTISVSTTSTTTTATATGDIVFQDFEGTGDFASRGWVATGGLLGAGPAQGTLAGQQTVTGYAGSRLVNTFLSGDSTTGTLMSPPFTISRPYINFLIGGGNAPGTECINLKVQGQVVRTATGADAEQLIPKGWDVTNLIGQTAVLEILDQQTGGWGHILIDQITFTGSTGTNNSRSDTSDIWDFNGTSTFADRDWTATGDFVGKAPAQGTLAGQQAVTGYMGNFVNTFLNGDATTGTLTSPTFTITQKKINFLIGGGNAPGTQCINLKVQGQVVRTATGADAEQLIPKSWDVTNLIGQTAVLEIVDLSTTGWGHILIDEISFSNASTESYGPNWLDYGPDFYAATTFNGLAPANRINIAWMNNWQYGSAIPTSPWRSMLSIARKLSLKTVDDRPRLIQQPTANWTSLQTTAYSNTFDTVAEGNQLVQISGKLLDITVTFSDRVAVSSSSQFGIILRATSNLAQQTRIGYDFSTKKIFVDRTKSGNVGFDGTFPNTYYAPLTPSSDGKVTMRILLDWSSVEVFGGQGEVTISAQIFPQDNGVDVRLFSGGGSTNGVMIDAKVYGSAYGSFTPPSTTLSTSSTSTDTATTISTTSTTSVGTTLTTSTRTTSSSSPTSTAPYDFRPVFHFVPEQNWMNEPNGLIKIGPTWHLFYQHNPTGNFWGNLSWGHATSTDLVSWDHKPVAISSTDEIQAFTGTSYFDSGNLSGLGTPSNPPYLAFYTGYFPSSGVQDQRLAYSLDQGVTWTKYQGNPIISQSQEAPHDITKGLEIRDPKVFYHSPTSRWVMILAHGGQNKFTFWTSTDAKNWTWRSDFAASNIAGFPGGVNGWEVPDFFELQIEGTTQKKWVLVVTPATGSPAGGNGVFALTGSFDGSVFSADAVDPTTLWLDYGRDWDGVMSWENVPASDGRRVLVAVMNSYGANPPTNTWKGMLSFPRTLEIKQLNGRLQFVQLPVSELDRVGTSVATITSQTLAPGQTLLSNVHSRSLDIRITFVPAQGSTLSLSVRKGGSQQTVIKYVQSNKQLSLDRNASGNISYDPAAGGVHTATLQADANGKVQLRVLVDECSIEVYGGQGEAVISDLIFPDISSDGLALSTSAGNVVLESVDVRSISL

SEQ ID NO: 315 - protein, 2240 aa, Unknown
  Description of Unknown: Penicillium brasilianum sequence
MNIEDLSRADMAALSVPATIKGESSMNAGSEVLLVTGLKRPRKALVGADDVSHRGAAPPLRDTLCSTQLLILNPPQLHFLRQISRFPTLRIAGRVFIYPFSSMTGKEKLHIVYVNLDRQGVFVTLSHRIQYCSDNVIAAMTGSNSIGSFTLSVQHSDHAKRTIQRPVDDPAALILEAWLQGLMTGSLLIMAAVTYANMRPGILLHKLILLELILALAHGTFIFAPDPVYGWYLAASAIGLIISWSLHNVIAWMKNRPFMGHKLSLFYVGTIVLAQPYWATEIYANFAYFNNANHTVYEKIRPWEALFRRPKCSFCIERGKDCFYPETPDPPPASLKAEISRLWAQVDHITAIIQGQKPRSSPSHDARQESFTLEASGASLGFPFMVLQSEAFLNLLGLEPSVPVLLEHVERGRKAIPGQACGANIVIIDLWKASILLNAFRKQIHTWYPILHADFIREFLQAMTLSFPMSITSCATLLVLAIGCVMECNSVVDAMRNRPEALYIEAAMKMLPCAFAHSGPRSAQCLLLFAIYHLCYGQPFQAYDFVAMASFKLQNYIINELNADSDATRISILKSCFWSALLIESEILVQLDLVDSGIRTMTSFVPVPTSSGNWTGDLSQLFESSAPSDSNSEFYLESSDLSYFVAEIAMRKMLQRCTWSTSRLAQGNHVYAPIVAAELERQLDEWLRLLPQQLSFRCSPAIRSHLRRDSGSAHVEFLRTQYYAFQASIYWPAVYEAIAAGEANSDLRRHCTKFFTSFAEFVPSAVASIAVCKPNLWTLCTSVFTISMAALAGMTESCLVEVVPREAMFGLELAIKAFDEAAEVSLSLAEMGAILKERAAFAQTYNELYRPQYHFTPAKNWMNDPNGLLYYNGVYHLYYQYNPGGNTWGAMSWGHATGTDLIHWDHQPVALLARGYPGDITEMFFSGSAVADTQNTSAFGTGGKVPFVAMYTSYYPVSQKLPSGKSVNGGQQAQSIAYSLDEGMTWTTYDAANPVILNPPTPYTDQWRDFRDPFLFWHEASQKWIAVVSLAQLHKLLIYTSPNLKDWTYTSEFGPWNAVGGVWECPSLFPLAVDGDDANTKWVMQIGLNPGGAPGVTGSGTQYIVGIFDGTKFVAETKSPLSTLTSTSTTTSVSIRSTTTTAAATATATGEIIFQDFEGASDFVSRGWIATGGLLGAAPAKGTLTGQQTVAGYAGNQLVNTFLSGDSTAGTLTSPAFTISLPYINFLIGGGNAPGTECINLKVQGKVVRTATGANTEQLISTTWDVKDLMGQTAVLEIVDQQTGGWGHILIDQITFTGSTSTNNLPKRSDSSDTWDFNGTSTFTDYGWTATGDLVGKGPAQGTLAGQQVVAGNMGNFANTFLSGDATTGTLTSPTFTITQKKINFLIGGGNSPGTECINLKVQGRVVRTATGANAEQLIPTTWDVTDLIGQSVVIEIVDLSTTGWGHILIDEISFSNLSIEPYGPNWMDYGPDFYAATTFNGLPSTSRINIAWMNNWQYASVIPTSPWRSMLSVSRKLSLKTIDERPRLIQQPTANWTSLRTTAYSNSFDTVAEGNQLVQLSGKLLDITVAFSDRVAASSSSQFGIILRATSDLAQQTRIGYDFSTKRLFVDRTKSGNVGFDGTFSETYFAPLMPSGDGQVIMRILLDWSSVEVFGGQGEVTISAQIFPQDNGVDVRLFSEGGSTNGVTIDARVLDSAYDLSTPISSLSISSTSTDTATTISTTSTTLVGSTLTTSIRTATSASPTPRAPYDFRPIFHFVPEENWMNEPNGLIKIGSIWHLFFQHNPTGNFWGNLSWGHATSTDLVSWDYKPVAISSADGIQAFTGTSYFDAENLSGLGTSSNPPYLAFYTGYAPSSGVQDQRLAYSLDQGATWTKYQGNPILPQSQEAPHDSTQGLEIRDPKVFYHGPTSRWVMILAHGGQNKVTFWTSTDAMNWIWVSDFAASNVEGFPGGVNGWEVPDFFELQVQGTSQKKWVLVVTPAAGSPAGGNGVFALTGSFDGSVFTADAVDPTTLWLDYGRDWDGAMSWENVPASDGRRVLAAVMNSYGVNPPTDTWKGMLSFPRTLELKKLNGKLQFLQLPVSELDAVGTSVATITNQTLAPGQALLSNIHSRSLDIHITFVPAQGSTLSLSVRKGGSQQTVIEYVQSNNQISVDRNASGNASYDPAAGGVHKATLQADVNGKVQLRVLVDECSIEVYGGQGEAVISDLIFPDISSDGLALSVIQGNVVLESVDVRTISL

SEQ ID NO: 316 - protein, 1419 aa, Unknown
  Description of Unknown: Aspergillus lentulus sequence
MTLFFFASVLAVGFSLLQTVGAQTYNELYRPRYHFTPANNWMNDPNGLLYHNGTYHLYYQYNPGGDTWGAMSWGHATSDDLTHWKHQPVALLARGYPDNISEMFFSGSAVADTDNTSGFGTDGIVPFVAMYTSYYPASRNLPSGKAVNGGQQAQSIAYSLDEGLTWTTYDAANPVILNPPAPYADQWRDFRDPFVFWHQPTQKWVSVISLAQLHKLLIYTSRNLKEWTYTSEFGPMNAVGGVWECPSIFPLALDGSEAQTKWVVQIGLNPGGPPGVVGSGTQYIIGSFNGTAFVADPDTPSPSTTSTSVSTPITTSTQTASTCPCPEETAVTGNVTFQDFEGSGDFASLGWVATGGLLGAAPAQGTLSGQQTVSGYAGARLVNTFLNGDSTTGTLTSPPFTITRPLINFLIGGGNAPGAECINLKIAGQSQAVRTATGRNEEKLLLQTWDVAEYIGQTAVLEIVDQQTGGWGHILVDEITFTGDATPPASIKDAAFSFNGTDTFESRGWTATGDLVGKSPSQGTLPGQQVVSGYRGNFVNTFYNGDATTGTLVSPAFTITKERINFLIGGGNAPGVQCINLRVDGHVVRTATGSDREQLLPKSWDVTDLIGKSAVIEIADLSTTGWGHILVDEISFSDVTAEPRGTNWLDWGPDHYAAASFNGLASADRTNIAWMNNWQYAAGIPTSPWRSMLSIPRKLSLKTINGWPTLIQQPAANWASLQTGAYSDALTTVPQGTQSIPLSGKSLDITVAFSHRNSTSPAQFGVLLRATSDLTQQTRVGYEFSTKRMFVDRTKSGNVGFDGTFSNTYYAPLEPGSDGKVTLRILLDSSSVEVFGGQGEVTLSAQIFPQDTGADVRLFSTEGSTSGITIDAKILASAFEAPTSSSTTSTALSTTLSTTLSTRGVSTNITSTSTSTSTATQPSATVPVDFRPVFHFVPEQNWMNEPNGLIKIGSTWHLFFQHNPTGNFWGNLSWGHATSTDLVSWSHKPVAISSADGIQAFTGTAYFDPQNLSGLGSASNPPYLAFYTGYFPSTGVQDQRLAYSLDQGATWIKYPGNPIISKTQEEPHDSTKGLEIRDPKVFYHTPSSRWVMILAHGGQNKLTFWTSSDAKAWTWRSDFTASNIPNLPSGINGWEVPDFFELPIKGTTQKKWVLVITPATGSPAGGNGVFAVTGAFDGAVFTADPVDPSAFWLDYGRDFDGALTWENVPASTDGRRILASVMNSYGGNPPTNTWKGMLSFPRTLELQQLNTGKLRFVQQPVDEIDAYAWPVANLTNATIAPGQTLLSDIHSRTLDIKMAFVPSPGSTLSLAVRKAGSQQTLIRYVQSSQQLSVDRNASGDISYDPAAGGVHTATVQPGANGEVHLRVLVDTCSLEVFGGLGEAVISNLIFPDVSADGVSLEVSGGNVVLRSVEVRKVLL

SEQ ID NO: 317 - protein, 506 aa, Unknown
  Description of Unknown: Aspergillus puulaauensis sequence
MRELLHSMGPRSFGCARHHRLPPPVEPSSYETKASRARTGDSVWHLFYQHNPTANVWGNLNWGHATSTDLLHWTHEPIAITSESGIEAFTGTSYYDSENTSGLGTVESPPYLAWYTGYFPSNGTQDQRLAYSVDSGVTWTKFAGNPIISAAQEAPHDTTRGLETRDPKVFFHEASGKWVMILAHGGQDKVTFWTSTDTKHWTWVSDLGTAQVSGLPTNITGWEVPDLFQLPIEGTGETTWVLILTPAKGSPAGGNGVFALTGSFDGETFQPDPVDPGNLWLDYGRDFDGAMSWENVPGSDGRRILAAISNSYGESPPTDTWKGMLSFPRTLALQQTGSARSFIQWPVSEILTVGSPLATIQNQTITPGQVLLSSVRGTALDIELAFTAQNDAVLALAVRKAGSQQTVIQYTQSTATLSVDRIASGDTSYDAAAGGVHNAPLKPDASGVVHIRALVDTCSVEVFGGKGEVVISDLIFPDETADGLALQVTGGSVMLRSVVVSEVSLE

SEQ ID NO: 318 - protein, 528 aa, Unknown
  Description of Unknown: Aspergillus fumigatus sequence
MAACFVYALAFGLSLPISSTTATSTRTSTTVQPLDTVPVDFRPVYHFVPEQNWMNEPNGLIKIGSTWHLFFQHNPTGNFWGNLSWGHATSTDLVSWTHQPIAISSEDGIQAFTGTAYFDSENLSGLGSPSNAPYLAFYTGYFPSTGVQDQRLAYSLDHGTTWIKYAGNPIISKTQEEPHDITKGLETRDPKVFYHTPSGRWVMILAHGGQNKVTFWTSSDAESWTWRSDFNANSIPNLPGGINGWEVPDFFELAIKGTTQKKWVMIITPATGSPAGGNGVFAVVGSFDGAVFTADPVDPSAFWLDYGRDFDGALSWENVPASDGRRILASVMNSYGGNPPTNTWKGMLSFPRTLELQQFNGKLRFLQLPVAELSAYTRLIANITNQTIAPGQTLLSDIHSRTLDIEMSFTPSPGATLSLSVRKGGSQQTFIRYAESAQQLSVDRNTSGNISYDPAAAGVHTATVQPDASGEMHLRVLVDTCSLEVFGGQGEAVISSLIFPDVSADGVSLEVSGGTVALRSVEVREVLL

SEQ ID NO: 319 - protein, 1424 aa, Unknown
  Description of Unknown: Aspergillus calidoustus sequence
MVSFLALGLAAGLSLLQAASAQTYNELYRPQYHFTPAKNWMNDPNGLLYHNGVYHLYYQYNPGGDTWGAMSWGHATSDDLTHWEHQPVALLARGYPGDITEMFFSGSTVADTENTSGFGVNGTVPFVAMYTSYYPGSRNLPSGKSVNGGQQAQSIAYSLDEGMTWTTYDAANPVILNPPAPYADQWREFRDPFVFWHAPTQKWVSVVSLAQLHKLLIYTSPNLKDWTYASEFGPMNAVGGVWECPSIFPLALDGNEAETKWVVQIGLNPGGPPGVVGSGSQYIVGSFDGTAFVADSNTPPPSSTSTAGSSTTATQTSTSCNCPSGTETPGNVTFQDFEGTGDFASRGWVATGGLVGAAPAQGTLPGQQTVSGYAGSRLVNTFLSGDSTTGTLTSPPFTIIRPQINFLIGGGNAPGAECINLKINGQSQAVRTATGQNEERLLPQTWDVTDYIGQTAVLEIVDSQTGGWGHILVDQITFTGTAPSQPPTQPPTGDGVWSFNGTGTYASRGWTATGDLVGKSPAQGTLSGQQTVSGYRGNFVNTFYAQDSTTGTLTSPTFTITQKRINFLIGGGNAPGVECINLKSRRTGSTGSDSEQLAPRSWDVTALIGETAVIEIVDSSTGGWGHILVDEISFSDDSTEPRGTNWMDWGPDYYAAAPFNGLPAEDRTNIAWLNNWQYATRIPTSPWRSMLSIPRKLSLKTLNGWPTLIQQPVANWADLQTGTYSNALSTVAEGTQSIPLSGKTLDITVTFSDRTSATGQFGLLLRATSDLAQQTRIGYDFSTKRMFVDRTKSGNVGFDGSFSNTYYAPLAPGSDGKVTLRILLDSSSVEVFGGQGEVTLSAQIFPQDSGVDVRLFSSGGSTSGVTIDAKVLGSIYGPPTSSSTSRTSSTSSTTGTSSTTGITTTTSTTLTTTTTTTSTSTSTTARPSATTPVDFRPVFHFVPDQNWMNEPNGLIKIGSTWHLFFQHNPTGNFWGNLNWGHATSTDLVSWDHKPVAISSGNGIEAFTGTAYFDSQNLSGLGSSSNPPYLAFYTGYFPSTGVQDQRLAYSLDQGVTWIKYAGNPIISQAQEAPHDVTQGLEIRDPKVIYHAPSSRWVMILAHGGQNKLTFWTSTNAIDWTWRSDFTASNIPNLPSGINGWEVPDFFELPIQGTTQKKWVLMITPATGSPAGGNGVFAVTGSFDGTVFTADPVDTATGAFWLDYGRDFDGALMWENVPTQDGRVILASVMNSYGGHPPTNTWKGMVSFPRTLELQQSNGKLRFLQQPVDEINGHAWPLADIENQVLAPGQTLLSNIHARTLDIEISFTPSPGSTLTLAVRKGGSQQTLVRYVQSSNQLSVDRNASGNTSYDSAAGGVHTATVRPGANGEVHLRVLVDTCSIEVFGGEGEAVISNLIFPDVSADGVALTVAGGTVTLSQVVAREILL

SEQ ID NO: 320 - protein, 237 aa, Unknown
  Description of Unknown: Aspergillus leporis sequence
MADSVDASGLWLDHGRDFDGVLSWENVLASDDRRILAAVMNSYGSNPPTNSWKGMLSFPRSLTLKQIGSKRYFLQQPVSELNTIGTSITRIQNQTITPGESLLSSIHGNSLDVRVSFLPAPGTILSLAVRKRETDQTVIRYAQSNSTLSVDRTASGNISYDPAAGGVHRAQLQIDGTEMVHIWILVDTCSVEVFGGQAQVVISDLIFPSNSSDGLSLEVTGGTAMLQSLEVRSILLE

SEQ ID NO: 321 - protein, 599 aa, Bacillus licheniformis
MKKRMIQMGIIGAMMFPEAFSAAAADPDYYNEDHRPKYHFTPEANWMNDPNGMVYYAGEYHLFYQYHPYGLRWGPMHWGHAVSKDLVKWEHLPVALYPDEKGTIFSGSAVADRHNTTGFQTGTEKPLVAIYTQDRSGEQVQSIAYSNDKGRTWTKYSGNPVIPNPGKRDFRDPKVIWHEQTKKWVMLLAGGDRILIYTSPDLKRWTYASEFGEGEGSHGGVWECPDLFELPVEGRPNETKWVMQVSVGDGAVSGGSGMQYFVGSFDGTTFKNENPPNRVLWTDYGKDFYAAVSWSDIPKSDGRRLWLGWMSNWQYANDVPTSPWRSAMSIPREVKLKAFSEGLRMIQAPVAELQSIRGASQTWKNKIISPRNGNLLKGLSGDAYEINAEFQVNTGAAAEFGFKVRTGENEYTKIGYSKNSASLFVDRSQSGNVSFNPNFNTGKHAAPLEPVAGKVKMRIYVDRSSVEVFGNDGRQVITDIILPDQSSKGLEVYASNGFVKLNSMTVHPLKKVWGASPFQSNLTGWTTVNGVWADTIDGKQGRSEGDSFILSSAKATDFTYEADVAIKDGNGRGQGLSCFGPIRMLKTDTLPMWMPSMTW

SEQ ID NO: 322 - protein, 693 aa, Bacillus licheniformis
MDFLPKKPSEEEGGKVMKKRMIQMEIIGAMMFPEAFSAAAADPDYYNEDHRPKYHFTPEANWMNDPNGMVYYAGEYHLFYQYHPYGLRWGPMHWGHAVSKDLVKWEHLPVALYPDEKGTIFSGSAVVDRHNTTGFQTGTEKPLVAIYTQDRSGEQVQSIAYSNDKGRTWTKYSGNPVIPNPGKRDFRDPKVIWHEQTKKWVMLLAGGDRILIYTSPDLKRWTYASEFGEGEGSHGGVWECPDLFELPVEGRPNETKWVMQVSVGDGAVSGGSGMQYFVGSFDGTTFKNENPPNRVLWTDYGKDFYAAVSWSDIPKSDGRRLWLGWMSNWQYANDVPTSPWRSAMSIPREVKLKAFSEGLRMIQAPVAELQSIRGASQTWKNKIISPRNGNLLKGLSGDAYEINAEFQVNTGAAAEFGFKVRTGENEYTKIGYSKNSASLFVDRSQSGNVSFNPNFNTGKHAAPLEPVAGKVKMRIYVDRSSVEVFGNDGRQVITDIILPDQSSKGLEVYASNGFVKLNSMTVHPLKKVWGASPFQSNLTGWTTVNGVWADTIDGKQGRSEGDSFILSSAKATDFTYEADVAIKDGNGRGAGALVFRADQDVKNGYLANVDAKHDVVKFFKFEDGSASVIAEHRTPIETGRKYHLKTVARGANFYIYLDDQLVISARDSTFTDGAFGLNAWDATAVFQHVYAKR

SEQ ID NO: 323 - protein, 675 aa, Bacillus sp.
MKKRLIQVMIMFILLLTMAFPAEAADSSYYDEDYRPQYHFTPEANWMNDPNGMVYYAGEYHLFYQYHPYGLQWGPMHWGHAVSEDLVTWKHLPVALAPDDKGTIFSGSAVVDRNNTSGFQTGKEKPLVAIYTQDREGHQVQSIAYSNDKGRTWTKYAGNPVIPNPGKKDFRDPKVFWYEKENKWVMVLAAGDRILIYTSKNLKQWTYASEFGQGQGSHGGVWECPDLFELPVDGNPNQKKWVMQVSVGNGAVSGGSGMQYFIGDFDGTHFNNENPSDKVLWTDYGKDFYAAVSWSDIPSSDGRRLWLGWMSNWQYANDVPTSPWRSATSIPREVKLKTLTGGVRIVQTPVKELQTIRGTSKRWKNQTISPASQNLLAGLSGDTYELHAEFQVTPGSATEFGFKVRTGRNQFTKVGYDQKNAKLFVDRSESGNVTFNPTFNTGKQTAPLKPVNGKVKMRIFVDRSSVEVFGNDGQQVITDIILPDRSSKGLELFAVNGSVKLKSLTIYPLKKVWGTSPFISNLTDWTTVNGTWADTIEGKLGRSDGDSFIMSSASGSDFTYESDITIKDGNGRGAGALMFRSDKDAKNGYLANVDAKHDLVKFFKFENGVASVIAEYKTPIDVNKKYHLKTEAQGDHFKIYLDGRLVIDANDSAFSEGHFGLNVWDATAVFQNVNK

SEQ ID NO: 324 - protein, 498 aa, Bacillus sp.
MNNNVLEKQQYFTEKYRPQYHFSPERNWMNDPNGMVFYNGEYHLFYQYHPNGTTWGPMHWGHAVSSDLVHWEHLPIGLAPDEHGTIFSGSAVVDWNDTSGFFGGEPGLVAIFTHADTYPDSDRPRQRQSLAYSKDNGRTWVKYEENPVLQEESITDFRDPKVFWHRETNQWVMVLAAGQTIRIYTSKNLIVWEFASEFGEGHGSHQGVWECPDLFELPVDGDSNQKKWVLFVSIGNDPKYKEGSRTQYFIGDFDGKTFFNHHEPETTLWIDHGRDNYAGVSWSDVPAADGRRIYIGWMSNWSYANITPTKEWRSATTIPRVLGLKKTEEGIRLVQNPIHELQSLRHERIVLENERVVPGKNLLDNVKSNTFEIIAEFEIGSATEFGFKVCKGANEETIIGYDVKKQTLFVDRTNSGEAAFHEDFAGKHESHLLPENNKIILHVFVDQSSVEVFGNGGKSVITDLIFPNEESKQIELYVKNGEVKLQSLELFTLKSVWR

SEQ ID NO: 325 - protein, 519 aa, Bacillus taeanensis
MQKHTTRIFVYAMSILLFIVSFLYPISDNVFASSKNEYYNETYRPQFHFSPKQNWINDPNGLVYVNGEYHLFYQYNPFGNTWGNISWGHAVSKDLVHWKHLPVALKPDDLGMIFSGSAVVDKNNTSGFFKGKKDGLVAIYTSSGETQQQSIAYSTDQGRTWTKYAGNPVIKNPGIKDFRDPKVFWHDETNKWVMVVAAGNKAMFYSSKNLKGWAYMSEFGAEEGAQLGVWEMPDLFELPIHNDPKKTKWFLKVNTNPGGTKEGYRSQYFIGEFDGTTFKNDNPPDTVLWTDYGKDFFAAQSWSNVPDRRIWIAWMNNWQYAEKIPTNPWRGSMTIPREVTLIEIPNKGVRLIQKPVEELKQLRKEKYMLKNQLVIPKTNLLSKIKDDTFEIVAKVELDSAKEFGFKVRKGEKEETIIGYDAVENKLFVDRTSSGETDFSEQFPEKFEAPLSPKDGKIKMHIFVDRSSVEVFGNDGKAVITSRIFPSPKSQGIEVYSIDGNVKLNSLEVYDLKSVWKNNE

SEQ ID NO: 326 - protein, 1998 aa, Bacillus sp.
MIKRELHRKGTIVFLSLLLLISSGFMNTPLSTSVQAASTLSNPGFETGDLSGWNVISGDAFSQSDVTSDSSFWNKQEFKQRNFWHIWGGRGDNSKVGVMQSETFTLGGDGKIDFLTGGDQDLENLYVSLVRETDGKELMKATGTGTDTYSKVEWDASEYIGSVVRMKIVDKSTSGHINLDDVNVPPTASLHDHTEPSIYNHDFEYTALVPSEVKGWEVVSGDAFGANSLVRENLWSEGDEFDHQGDYHLWSHKSGGDEQTGELHSESFTMSGSGGIDFLIGGGEDLNKLYVALVRESDGKELFKETGRNSEKYQRVFWDASAYVGESVYIKVVDQATGGFGHINVDDFHVDNSVYSDSLVAHLNFNEGKGSETKEQVTGKMNPIEYHLSDGKFQAKQDPMWKKDGISNGALLFDGYSTWVSQSPNQTPALTDALTIEAWVAPRNFEHGDEGRLSAIVNQHDREKKEGFILGNYRHGTWGMNFGTGSEWNEVLSDTVLPLNEWSHIAATYDSKTGEAVLYQNGKKVTSRNFTPGKKIKPSVKDLLIGKNNDGMWLYGFNMNMFSGLMDEVKIYNKSMDAETIKESYQLTIDSLEGNLPTPDMKVDRSILAQDKHRPQFHMSPPNHWGNEPGGPIYFNGQYHTFYQSNPRGPFWNHIRWGHLVSDDMVHWRDVDDAVIPGKHDVDPEGAWAGGAVVGDDGVPVIFYTAGDDRDSPNQRINIARSTYEKDGDNDLNRWEKNAEVVLDQEDGQGIKGEFRDPFIFKDGDTWFMLVTSGKEDGNGKQVGGTALVYSTKDSKFKDWDYRGELFIGDYDQYPKTGRVWELPILLPLGESGKYIFLINPAKTSRDEYQSRYTYYWIGEWNPDTARFVPDEKKPTLLDVGDHFTGPAGMVTEDGRTVIHSITQGRRPADDDYAAGYAHNYGLPVEVSYRQDGKLGVEPIEELTELRGNQLVNLTNETSFESANQTLSSVQGDMLEIELELDKGEANELGLSVRRSPNGEEETTIYYKASEKEFWVNRLKSSLDPDVEKWYQGGKADIGSESVKLHMYVDRSEINAYLNGVKSLTTRAYPTRDDALGVKLWANENSGSVKVKSLKVWEMKSAYTPVKPTDISFNPGTLEIIKGGSEYITPDIKPADASNKSVIWTSSNPSVATVTNGKVFGKSVGTATIKAVTREGGFTATKSIEVKAEPPHDELVNHDFETPNLSGWTVMSGDAFTDLDVTAAKDWGWGGPFNHQGNYHLFGVNEGNDGQKGVIRSQKFILGGNGQIDFLVSGGNNIYNLYVALVRESDGKELMKASGGNQEGYSRVKWDASDYIGERVYIKVVDDNTGPWGHINIDDVNAPVQKPAKMTIANPDFETGDLTGWKVKSGNAFSSGDVTDEEEWTWGCCFNQQGQYHLWSFKDGGDDQVGEIHSETFTLHGSGWVDFLISGGKNEDTLYAALVRSKDGKELFKATGADDETYRRVYWDASSYVGEEVYIKIVDKATGGWGHVNVDDFHVYNTEETITTSDRYEQYRSQFHYTPKKNWMNDPNGLVFFEGEYHLFYQQNPTGTTWGPMNWGHAVSKDLIHWEELPIALENDEIGFIWSGSVVIDKNNSAGFGNNAMVAMFTHEKGGAQVQSLAYSLDKGRTWKKHSGNPVIENQDNLPVFRDPKVFWHEQSNKWVMVIAAENAQREQFVRIYTSNNMKQWSLASEFGKNEGSHAGVWEVPDLFELPIDGNPTNKRWVLQVSLSDGMPAGGSGVQYFIGDFNGETFTNENEPNKVLYADYGADYYAPLTFNNIPEADGRRIAMGWMNNWSYGQSTPTSIWRSKMTLPRELKLVDLPGQGIRLTQNPVQEFQTLRDDLKQWENQTLSPNTNLLSEVKGEAVEIIAEFQTDTTTATEFGFNVRTGKGEQTTIKYNKSDQKLVLDRTKSGDGSFSPTFESVHEARMDPKDNKIKMRVIIDRSSIEVYGNDGQVVLTDQIFPQLSSNGLSTFVSNGNATLTSLKVYPIKKALLP

SEQ ID NO: 327 - protein, 1992 aa, Bacillus korlensis
MNAKAFIQKVTIIIISFVLILFSVITMKPQKFVEAANTLTNPGFETGDLSGWTVVSGNAFSDLDISSESDYWNKQAFKQRNFWHIWGGRGDNTKVGVMQSETFTLGGDGQIDFLTGGQNDINHLYIALVRESDGAELMKATGTGTDEYSKVSWDASAYINTVVRMKVVDQSTEGHINLDDVNVPPTPSLHDHIEPSIYNHDFEYTALVPFEIKGWEMVSGDAFGPNSLVHEEFWSQGDTFHHEGNHHLWSFKDGGDEQVGELHSETFTLDGSGGIDFLIGGGEDYENLYVALVRKSDGKELFKETGRNTEMYQRVYWDASAHIGESVYIKIVDKATGAWGHISVDDFHVYNSVYSGGLVGHWNLDEGSGKITKEQVSGNKDPVDYHLNEAVFQSSQDPLWKKDGISNHALLFDGYSTWVTRTPDEIPVPSEAMTLEAWVAPRNFEHGDEGRLSAIVNQHDRDRKEGFILGSYRHGTWGLNFGTGSDWHEVMSDTLLPLDEWSYVVATYNSVTGEAVLYQNGQKVASRDFPAGQKIKPSVKDLLIGKNNDGMWLYGFHLNMFSGLLDEVKIYNHALTSADIKKSYDSYVDALGGNLPTPDMKMDRSILGNDQHRPQFHMSPPNHWGNEPGGPIYFNGQYHTFYQSNPRGPFWNHIRWGHLVSDDMVQWRDVDDAVIPGRYDVDPEGAWAGGAVVDDNGVPVIFYTAGDDRDSPNQRINIARSTYKEDGDNDLNRWEKHPEVILDQKDGQGIKGEFRDPFVFKDGNTWFMLVTSGKEDSSGKPIGGTALVYSTEDSSFENWTYRGDLFVGDYNQFPKTGRVWELPILLPLGDSGKYIFLINPAKTSRDEYQSRYTYYWIGTWNAETARFTPDHATPTLLDVGDHFTGPAGMVSPDGRTIIHSITQGRRPADDDYSAGYAHNYGLPVEVSYRTDGRLGIQPIEELKQLRGQQLVNLTTDTSFHDANQALSSVKGDMLEIELELDNGSANEAGISLRRSPNGEEETIVYYKESSKELWINRLKSSMDPDIEKWYQGGTADIGTENIKFHIYVDRSEINAYLNGIKSLTTRAYPTRNDSTGIQLWANADSSTITVKSLKIWEMKSAYTPVKATGVSLHPATMELIEGDSELLTPTVTPANATNKEVIWTSSNPSIATVVNGKVTAKAVGSTTITATTRDGGFKANSKIIVISEPPHDELVNHDFELPNLSGWTVLNGDAFTDLDVTAAKDWGWGGPFNHNGDYHLYGIDNGDDAQVGTIRSQKFTLGGNGQIDFLISGGNDIYNLYVALVRDSDGKELMKVSGGNQEGYTRVKWDASEYIGEKVYMMVVDKATGSWGHISIDDVNAPVQPPAKVTISNPDFESGDLTGWTNVSGDAFSQLDITSENSWSWGCCFHQQGTYHLWNFKDGGDSQIGEIHSDTFTLHGSGWVDFLLSGGKDMDHLYVSLVRASDGKELFKATGSEDEKYTRVYWDASSYVGEEVYMKIVDNSTGGWGHINVDDFHVFNTEADITTNDRYEKYRSQFHYTPDRNWMNDPNGLVYFEGEYHLFYQHNPTSTTWGPMNWGHAVSTDLIHWDTLPIALEEDENGFIWSGSVVVDENNTAGFGKNAMVAMFTHEKGGNQIQSLAFSSDKGRTWKKYSGNPVIANTDHLPVFRDPKVFWHSPSNKWVMLLAAENIQQEQFVRIYTSSDLKNWSFASDFGKNEGSHAGVWEVPDLFELPVDGDENNKKWVMQVSLSNGAPAGGSGVQYFIGHFDGKAFTNEHSAETILYADYGADYYAPLTFNHIPSLDGRRIAMGWMNNWSYGQSIPTSIWRSKMSLPRELELKTVPGVGVRLTQNPVSEFNTLRETVNSWTNQLLSPNSNLLSNVKGDTLEIVAEFQTDNATATEFGFRVRTGNGEQTTIGYDRVNSKLFVDRSESGATNFHPTFKARHEAPMQTNNNKITLRIIIDRSSVEVFGNNGQIVLTDQIFPQLQSDGIKIYSIDGDVTVNSLKVYQLK

SEQ ID NO: 328 - protein, 677 aa, Bacillus sp.
MEKKRMQIVIMLMLLLSAALPVYAADSSYYNEEHRPAYHFTPEANWMNDPNGMVYYAGEYHLFYQYHPYGLQWGPMHWGHAVSKDLVRWEHLPVALSPDDKGTIFSGSAVVDWNNTSGFQTGKEKPLVAIYTQDREGVQAQSIAYSNDKGRTWTKYSGNPVIPNQGKKDFRDPKVFWHEETKKWVMVIAAGDRILIYTSSNLKEWTYASEFGQGHGSHEGVWECPDLFELSVDGNPNQKKWVLQVSVGNGAVSGGSGMQYFIGDFDGTAFKNENPPEQVLWTDYGKDFYAAVTWSDIPSSDGRRLWLGWMSNWQYANDVPTSPWRSAMSIPRELKLKALSKGYRVIQSPITELQSIRGASRGWKNNIISPASSDLLPGQSGDAYEINAEFQVHAGSAAEFGFKVRKGENQYTKIGYHKNSALLFVDRSRSGNVSFNPSFNTGKHAAPLRPVNGKVKMRIFVDRSSVEVFGNDGRQVITDIILPDQSSKGLEVYASNGFVKLNSMTIHPLKKIWGKSPFTSNLDGWTTVNGVWADTIDGKQGRSDGDSFILSSSSGSDFTYESDITVKDGHGRGAGALVFRADQEVKNGYLANVDAKNDVVKFFKFENGMAAVIAEHKTPIDVNQTYHLKTVASGTNFKIYLDDRLVIDAHDSAFSSGTFGLNVWDATAAFQNVYVNQ

SEQ ID NO: 329 - protein, 698 aa, Bacillus sp.
MLIQQEAGRKQEGKRKERIMRMKKKLVQMGAMLMFLLPGALPVEAVDPSYYDEDHRPQYHFTPEANWMNDPNGMVYYAGEYHLFYQYHPYGLQWGPMHWGHAVSKDLVHWKHLPVALHPDENGTIFSGSAVVDWNNTTGFQTGAEKPLVAVYTQDREGHQVQSIAYSNDKGRTWKKYPGNPVIPNPGKKDFRDPKVFWHEETKKWVMVLAAGDRILIYTSPNLKEWVYASEFGEGQGSHGGVWECPDLFELPVDGNPHQKKWVMQVSVGNGAVSGGSGMQYFVGDFNGTAFKNENPSSQVLWTDYGKDFYAAVTWSDIPSSDGRRLWLGWMSNWQYANDVPTSPWRGAATIPRQLELKTLSEGIRVVQTPIRELHSIRGAFREWNHKVISPASGQLLAGLSGDAYEINAEFQINSGMASEFGFKVRKGDDQYTKIGYHPNSAALFVDRSQSGRADFHPGFNTGKQTAPLRPVNGKVKMRIFVDRSSVEVFGNDGQQVITDIILPDKSSKGLEVYASNGFVKLNSLTIHPINKVWGQSPFTSNLAGWTTVNGVWADTIEGKQGRSDGDSFITSSASGTDFTYESDILIKDGNGRGAGALVFRADQDVKNGYLANVDAKHDVVKFFKFENGAATVIAEHQTPIDVNRKYHLKTVADGSNFNIYLDGRLVIDADDHTFSNGRFGLNVWEATAVFQNVYANQ

SEQ ID NO: 330 - protein, 495 aa, Bacillus sp.
MNNVIEKQNYLEKYRPQYHFSPASNWMNDPNGMVFYNGEYHLFYQYHPNGTTWGPMHWGHAVSKDLVHWEHLSIGLAPDENGMIFSGSAVVDWNDSSGFFDGKSGLVAIFTHADTYPDSNRPRQRQSLAFSKDNGRTWTKYVGNPVLQEESIIDFRDPKVFWHRDTNRWVMVLAAGQTIRIYTSKNLTSWEFSSEFGEGHGSHDGVWECPDLFQLPVEGDDNQKKWVLFVSIGDDPSLQEGSRTQYFIGDFDGHSFVNDSSPETILWIDHGRDNYAGVSWSDVPAEDGRRIYIGWMSNWRYANVTPTKEWRSAMTIPRVITLKTTEEGVRLVQNPIRELQGLRVENISIQNEVVVPGVNLLSNVNSNTFEIIAEFEMSSATEFGFKVCKGSKEETIIGYDVKNKSFFVDRTNSGEASFHDSFAGKHDSNLISQKIIKFHIFVDRSSVELFGNDGESVITDLIFPNEENKQMELFVKNGEVKLHSLELYILKSIWR

SEQ ID NO: 331 - protein, 496 aa, Bacillus sp.
MSTIIYREKYRPQYHFTPPTKWMNDPNGMVYFEEEYHLFYQHHPDGTTWGPMHWGHAISTDLIHWEHRPIALKPDENGAIFSGSAVVDWEDTSGFFSGKSGLVAIFTHADQYPDSNRPRQRQSLAYSTDKGRTWSLYEGNPVLCDEQIIDFRDPKVFWHADSQRWILVLAAGDRVHIYTSRNLKEWKFASEFGADEGSHDGVWECPDLIELPVEGQENASKWVMIVSIGDNPAFQEGSRTQYFVGHFDGQAFTNDSSPETVLWLDHGRDNYAGVTWSDVDRTDNRKLFIGWMSNWKYANITPTDTWRSAMTLPRLLSLRSVRDRIRLVQKPVTDVQKLRQQSQHWEEVSVSPGQNLLSDMQGDIYEIECELEVGNASEIGFKLRKSEQEETVVAYNAVAQSLYIDRCNSGEKAFHEAFGCKHEVTLQTEKGRLKLHLFVDQSSVEVFADDGEIAITDQIFPDPSSTGLELYVRGGSAKVISLSLHVMKTIYPVATV

SEQ ID NO: 332 - protein, 1788 aa, Bacillus sp.
MKQKIKNQGISIMIIFSLMISLFMPAVSSKAETSVSSSSSVDGENEPYRSKFHFSPEKNWMNDPNGMVYYDGEYHLFYQHNPTESKWGPMYWGHAVSKDLVNWEYLPIGLYPDEKGFIWSGSAVVDWNNTTGFGKDSKPPMVAVFTQEKGGHQVQSLAYSNDKGRTWTKYDGNPIIPMPEGIDVFRDPKVFWHDETKKWIMVISAGDRVYFYNSPDLKSWTKVSEFGNNDGSHTGTWECPDLFALPVDGDPTKKKWVLAVSISEGAPAGGSGMQYFIGDFDGKTFTNANDPSKVLWADYGADFYAAVSWSDVPDGRRLWLGWMNNWKYGQDIPTSSFRGTMSTPRELALSTVEGEGIRLKQKPAAELESLRGNPQDIENKVITPGENLLSKLTGDAFEITAEFELNSAKATEFGLKVRKGESGETKIGYDIGSKKIFVDRSNAGESGFNGQFAAIHEAPLSAINQTVKIHLIVDRASVEVFGNDGQAVITDQIFPDPKNQSLELYTTGGEVQLKSLMVYDLNQASFVSNIDKIAVDGGSLRNEIENPDFETGNLSGWTEAGSAFDHPVSNVTSFWGGPFQQQGTYHVWGFAGAANDANADFRTGVMKSTVFKLGGNGMIDFLVGGGQDINKLYVALVRASDGKELFKATGSNTEAYRRVSWDASEYIGEALYMKVVDYHSGGFGHINVDDFHVFNNDPVMTDDIQNPDFETGDLTGWTIVEGDAFSNRDVTDDKDWGWGGPFNHHNDYHLWGAKDGGDGQTGILKSANFTLAGNGEINFLIGGGNDIDKLYVALVRASDDKELIKATNTNWKESEAYTRVKWDAANYLGEKVYIKVVDHATGGWGHINVDDFHVKNTGIIANWPLDEGSGTKTKDFVRGKADPISYVFTKALYKPSTDPLWRDGIRNKALLFDGYSTWITRPSDQVIKSADALTIEAWVAPRSYEWGDLGQLSAIVNQHNKAASEGYILGMGRHGKWSFQASINGEWKEVWAAENKPLEKNKWSYIVATFDKAEQKMKLYLNGELVGETATPKGTITPSSNDLLIGKHNSAALINGAFTANMFNGMMDELKMHNLSLSGEKIKENYDSYLSSFENHKLPIPDLAPDRSRYDGDRYRPQYHFIAPEHWMNEPHAPFYYNGKYHLFYQNNPQGPYWHHIHWGHSVSEDMVHWKDEPIALAPDGNSVAPDGVWSGGSTVDGNGNPVLFFTAGDDKKVPNQMTGLATSKDPGDPDLKEWSMYEKPVTVQAPNLPAKEGEVWYGQFRDPYVWKDGDTWYQLVGSGIKGAGGTALLYTSKNLKDWEYKKPLIVGNYKQNPKTGQVWELPVFLPLGKDAKGIEKYVFFFNPWFDGYSPHNVKYVWYWIGTWDKEKLEFVPDHTDPKQFDYGEHFTGPSGMVDGKGRSILFSIAQDRRTEQQHYDAGWAHNAGLPLELSLNSEGGLGIKPITELSSLRKKELVSIKNENTDKANELLTNVKGDLLEIQLEINPASAKQVGLKARKSANGEEETLLFFDVEKQSLNIDRNKSSLDPDIQKGIQGGELKIGKENLKLHIYLDRSMIEAYANGKKSITSRVYPTLSDALGLELWSNGGNAKVVSMKVWEMGSAYGETVPAYWPESNGGGDPIPESTELPNHDFQSGDLTGWTVVEGKAFSNEHVSKANDWGWGGPFNQASDRIDPERYHLWGFNGEKGGDSLTGVLKSENFVLGGNGKIDFLIGGGANIDRLYLALVRASDGKELMKETGGNWEAYRRVNWDASDYIGEELYIKVVDYETGGWGHINIDDVNVPVAIKR

SEQ ID NO: 333 - protein, 914 aa, Unknown
  Description of Unknown: Aspergillus hancockii sequence
MGSQSPSTTPQPHVPKPGVWCPAVTFFDHKTDTIDFIAQKKYYSYLSKTGLAGLVILGTNSEAFLLTREERAQCIAAAREAVGPDYPLMAGVGAHSTKQVLELANDAAAAGANYLLVLPPAYFGKATNMNVVKRFFADVARQAPLPVVVYNFPGVCNGVDLDSETITDIVRESAASRADGVSNVVGVKLTCASVGKITRLAATFKQEEFAVYGGQSDFLIGGLSVGSVGCIAAFANVFPKTAVRVYELFKAGKVAEAIDLQQKAALAESPCKSGIASTKYATAIYSAPLAGIEGAEEKLKPRKPYEEPGEGAKKTVKQLMDPVALFEGDVLIDRDAIFEVNLNIGETPEDSLSVDVVGYKYPGHVPSVRGTPTIATTASTQNHCKGAGEMHVLSFVFPALVAVAHAANYSGDLRPQTHFSPPSNFMNDPNGLFYDDKRGVYHLYYQYNPSDTVAGNQHWGHATSPDLYHWTNQPIALSGDKPEEYIFSGSAVVDKDNTSGFFPDQDDGVVAIYTVDTPTLETQNIAYSRDGGYTFTKYENNPVIDIGSKQFRDPQVTWHAETQQWVMTIAYAQDLVIGFYTSSNLREWTHASNFTQEGLPGVQFECPNLVKFSVDRAVSNETSKYVLFISVNPGAPLGGSGTFWLAGDFNGTHFTSEVAEETLFDFSKDNYAAQWFSSIPDNEPPVSIGWASNWDYTQEVPTGTLEGWRSAMTLPRAHTLTKVNGEWAVTHSPFKSLSTIKGRQLANKHLKTGDVKLNFSGVPSKAIYFDVAIKGIDVTSPTGHVNFNFTSSSSIEYLDGGVSLDDRFFWINRAGTHLFTIADNGNYTSSSNTTVSSFANGTFSFSGVIDRSVFEVFLGEDGIQTGTMTFFPKAPLDTLTVSAEGLSDRSSVNVKAWGLQSGWNSTKAGVRTRA

SEQ ID NO: 334 - protein, 519 aa, Unknown
  Description of Unknown: Aspergillus avenaceus sequence
MLVQSILLPALAAVAHAADYSGHLRPQAHFSPPTNFMNDPNGLFYDDKRGVYHLYYQYNPSETVAGNQHWGHATSPDLYHWTNQPIALSGDKPEEYMFSGSAVIDSNNTSGFFPDQDDGVVAIFTVDTPTLETQNIAYSRDGGYTFTKYENNPVIDIGSKQFRDPQVTWHADTGNWVMAIAYADDLVIGFYTSPNLRDWTHASNFTQEGLPGVQFECPNLVKVPVDGVISKETSKYVLFISVNPGAPLGGSGTFYVVGEFNGTHFISEVAQETLFDFSKDNYAAQWYSGIPEGEPPVSVGWASNWDYTEEVPTGPLEGWRSATTLPRAHTLTKVNGSWAVTHRPFKGLSSIKGEQLLNKHLKAGDVNLDFSSVSSNAVAFDVSLAGIDTVSPVGEVNFNFTSSSTGEHLDGGLSLHDGYFWINRAGTHLFTVADDGNYTSSSSTIVPSFGNGTFGFSGVIDRSVFEVFLGHDGSQSGTMTFFPTAPLDTLTISAEGLNNRTSVSVTAWGLESGWNSTQA

SEQ ID NO: 335 - protein, 514 aa, Unknown
  Description of Unknown: Aspergillus thermomutatus sequence
MRAHLLLFSAALAAAQTANYSGPLRPQVHFSPPDHFMNDPNGLFYDNKRDIYHLYYQYNPSQIVAGNQHWGHATSKDLYHWTNHPIAISPSKPDEWIFSGSAVVDSNNTSGFFPDQDDGVVAIYTLATATLQTQNIAYSTDGGYTFTKYENNPVLDIGSSQFRDPQVVWHPETQKWVMTVAYADDRVIGFYTSPDLKDWTHASNFTQEGLPGTQFECPNLVKFSVDCTVSEDEDTKHVLFISVNPGAPLGGSGTYYVVGTFNGTHFTSEVAHETLYDFAKDNYASQWYSGIPEDEPPVSIGWASNWNYTQIVPTGPLEGWRGSMSLPKEHTLTKVNGSWVVTQQAFDDLASVRGKRLHGHRSRSGDVTFNFSDVQSDAVSFDVKIKGIPSSGATGQVYFNFTSSTSGEYIDGGLRLDTGFFWINRAGTHLFTQANSTGYWPVFNTTVKSFDHGKFTFSGVIDRSLLEVSLAEGIQSGTMSFYPTHPLDTLTVSGSDLSRRTSFQVKAWGLESGW

SEQ ID NO: 336 - protein, 513 aa, Unknown
  Description of Unknown: Aspergillus clavatus sequence
MRTHLLLISALVVAAQAVTYSGDLRPQVHFSPPANFMNDPNGLFYDSKREIYHLYYQYNPYQTVAGNQHWGHATSPDLYHWTNHPIAISPSRSDEYIFSGSAVVDSNNTSGFFPGQDDGVVAIYTLATAELQAQHIAYSTDGGYTFTKYEGNPVLDIGSSQFRDPQVVWHSETERWVMTIAYADDRVIGFFTSPDLKEWTHASNFTQTGLPGTQFECPNLVRFSVGPVLPQENTKDVLFISVNPGAPLGGSGTFYVVGTFNGTHFVSETAHETLYDFGKDNYASQWYSGISEDEPPVSIGWASNWNYTEQVPTGPLEGWRGAMTLPKVHTLTKVDGSWLVTQQPFDDLSSVRDKRLRAHVAQNGDVTLDFKHVPSHAIYFDVRVDGISQSTSAGQVFFNFTSSKSGEYIDGGLNFNTGLFWIDRAGTHLFTQANSSGYWPVFNTTLTAFEQSRFLFSGVIDRSLLEVFLDDGKQTGTMSFYPASPLDTLTVFGRDLGEKIRFHVEAWGLESGW

SEQ ID NO: 337 - protein, 517 aa, Unknown
  Description of Unknown: Aspergillus turcosus sequence
MRAPLVLLGAAVAAAQAANSNYTGPLRPQVHFSPPYNFMNDPNGLHYDAKRGIYHLYYQWNPYQIVAGNQHWGHATSKDLYHWDNQPVAISPDKEGEWIFSGSAVIDKDNTSGFFPDQDDGVVAIYTLATATLQTQDIAYSRDGGYTFTKYENNPVINIGSSQFRDPQVTWHAETQQWVMTLAYAQDLVIGFYTSPNLRDWTHASNFTQPSLPGDQFECPNLVKFPVDPKVAKDTSKYVLFISVNPGAPLGGSGTFYLVGTFNGTHFNSETPHETLYDFAQDNYASQWYSELPGGSPPLSFGWASNWNYAQDVPTGPLEGWRSAMSLPKTHTLTKVDGSWVVTSEPFNDMDCVRGKPLKAQRSRNGDVTFDFSDIESNAVSFDVDINGIPSSHATGQINFNFTSSTSGEYIDGGLDLDTGLFWINRAGAHLFTPADNSGWSTSFNTTVKNLFNKGKFTFNGVIDRSLLEVTLADGVQVGTMSFFPTHPLDTLTVSGCDLSKKTSFRVKAWGLESAWE

SEQ ID NO: 338 - protein, 513 aa, Unknown
  Description of Unknown: Aspergillus steynii sequence
MLLQSLVLSSLLGIARAADYSGSLRPQVHFSPPSGFMNDPNGLFFDSKRGIYHLYYQYNPTETVAGNQHWGHATSEDLYHWTNQPIAISPSKPDEYIFSGSAVIDSENTSGFFPNQTDGVVAIYTVDAPEAETQHIAYSTDGGYTFTKYQDNPVIDSTSKDFRDPQVTWHSETERWVLAIAYAEDLVIGFYTSPNLREWTHASNFSQSGLPGTQFECPNLVKFAVDQESGEESKHVLFISVNPGAPLGGSGTYYVVGDFNGTHFTSEDSHETLYDFAKDNYAAQWFSGLSEEKSPISITWASNWDYTDKVPTGPLEGWRSSTGLPRVHSLINLDGKWTVTQAPFEDLSPVRGRQLAQERLGNDEATVDFSDVQSNAISFNVTIEGVVAFDPAGQVNFNFTSSSSGEYLDGGVVLDTGRFWINRAGTREFTRADNADFTSLFNTTVSSKGGSFSFSGVIDRSVFEVFLEQGVQGGSMTFFPTAPLDTLTISAEGLDEQTSVSLDVWNLKSGWEK

SEQ ID NO: 339 - protein, 511 aa, Unknown
  Description of Unknown: Aspergillus glaucus sequence
MHLGLFALPLLAATAQAAVNYSEPLRPQVQFSPPEGFMNDPNGLFYDAKRSTYHYYYQYNPDEPVAGNQHWGHATSPDLYHWTNHPLALEPDNADTFIFSGSAIIDSENTSGFFPDQDDGVVAIYTAHSSTKETQHIAYSTDGGYTFTKYANNPVIDSHTNQFRDPKVFWHAESQKWAMVIAWAEDLKIGVFTSPNLKDWTATSNFTQEGLPGDQFECPNLVKFSVDEETTKDVLFISVNPGAPLGGSGTYYVVGDFNGTHFNSETEDYTLIDFSKDNYAAQWFDSLPEDSKPVSIGWASNWDYTEEVPSAREGWRSAATVPREHTLTKIDGAWRVTQTPFQGLSSVKGNKLEEKTFSDGDISVDFSSVESNAVYFDVAINNLPSADATGELTFNFTSSASGDYLDGAVELNTGSFWINRAGTHLFTTADNGNFTGQFDTSISVSESGQFTFSGVIDRSVFEVFLEDGKQSGVMSFFPTKPLDTVTFAATGLGEDVTVDVGVWGLKSGWSS

SEQ ID NO: 340 - protein, 514 aa, Unknown
  Description of Unknown: Aspergillus candidus sequence
MRIPPWIMCFVAAAQAADYTGPLRPQVHFSPPVNFMNDPNGLFYDDRSGTYHLYYQYNPSEPVAGNQHWGHATSPDLYHWTNQPIAISPAESDEYIFSGSAVVDADNTSGFFPDQEDGVVAIYTVDTPNKETQHIAYSRDGGYTFTKYAGNPVIDSASKDFRDPQVTWHHDTQRWVMAIAYAADRVIGFYTSSNLKEWEHASNFTQAGLPGVEFECPNLVEFSVNQAVAHKGKKHVLFISVNPGAPLGGSGTFYVVGDFNGTHFESETPHAPLYDFAKDNYAAQWFSGIPAGHPPVSIGWASNWDYTEEVPTGETEGWRSAATLPRTHTLTQVDGSWVVTHSPADGLAPVRGAQLGSWDLRSGNDGMTVDFSHVSSKAVYLAVAIEGINPLSPVGEVAFQISSSASGESLDGGLRLDQNRFWISRAGARLFTTQDHGNFTSEFRTEVSIENSSFSFSAVVDRSVFEVFLEDGSGSGTMSFFPTSPLDILDVSAGELEAGSRVSVDVWGLRGVWE

SEQ ID NO: 341 - protein, 509 aa, Unknown
  Description of Unknown: Aspergillus sclerotialis sequence
MRFFVLSALASLAWASSDYSGPLRPQVRFSPPHGFMNDPNGLFLDPKGIYHLYYQYNPTGLVAGNQHWGHATSRDLYHWTNQRIAISPDNSDEAIFSGSAVVDSENTSGFFPDQDDGVVAIYTLDTPEAETQHIAYSRDGGYSFTKYASNPVIDSNSTDFRDPQVVWHPETQKWVMAVAYAKDLVIGFYTSPNLKDWTHASNFSQKGLPGDQFECPNMVKFSVDEIDEEKHVLFISINPGAPLGGSTTMYLVGHFNGTHFTAEDPFKLADFSKDNYAAQWYSNIPEDQDPISIAWASNWQYTEEVPTGQLEGYRGSNSLPRVNTLQKVDGTWTVTSAPYDGLSTVKGPLISRQSTRNGDIAVDFSKVDSNAISFDVEVSGIFGPQATGEVIFNFTSSTGEDFLDGGIHLDSGEFWINRAGTHGFTTADNKAFTPSFNTTIPSFANGRFSYSGVIDRSLLEIFLNGGEQSATTSFFPNSPLDVLTVSARSLGKGTTVKVNAWGLESGWNS

SEQ ID NO: 342 - protein, 510 aa, Unknown
  Description of Unknown: Aspergillus terreus sequence
MKTSCLVAFAVMAVANAADYSGALRPQVHFSPPKDFMNDPNGLFFDDRKGIYHLYYQYNPTGLVAGNQHWGHATSRDLYHWDNHPIAISPSHPEEYIFSGSAVLDRDNTSGFFPDQDDGVVAIYTVDTPTSETQNIAYSHDGGYTFTKYADNPVINSTSKDFRDPQVTWHAETGRWVMTVAYAADRVIGFFTSPNLRDWTHASNFTQPGLPGVEFECPNLVRFVVADGSTRDVLFISVNPGAPLGGSGTYYLVGQFDGTSFTSESANETLYDFAKDNYASQWFSGLAPGAAPLSIGWANNWQYTQEVPTGPLEDWRGAMSLPREHGLREVGGKWVVTQRPVGDLRPVRGERVVSRRVRNGEVTANLTGVVSNAVYFDVVVSGVPVGQGAGTVSFNFTSSSGEHVNGGVELDSERFWMDRAGTHLFTTQDNADYTSRFETPVTVEHGVVRFSGVLDRSLLEVFLNKELQSGTMVYYPTAPLDRVVFSAEGLGNGTVVHVDVWGLRSGWTGV

SEQ ID NO: 343 - protein, 512 aa, Unknown
  Description of Unknown: Aspergillus ellipticus sequence
MRFSIAALALPVAAQAANYSGSLRPQVQFSPPYGFMNDPNGLFYDAKRDLYHLYYQWNPYELVAGNQHWGHATSQDLYHWTNHPAAISPSNPDEYIFSGSAVIDGNNTSGFFPGQDDGVVAIYTVDTAEAQTQNIAYSTDGGYTFTKYAHNPIININSTEFRDPQVTWQPETKQWLMTLAYAADKVIGFYTSPNLRDWTHASNFTRQNLPGDQFECPNLVKFAVDTEGSKHVLFISVNPGAPLGGSGTYYLVGDFNGTHFNPDTSDPTLYEFSKDNYASQWYTDLSAQSSPISIGWASNWDYAEEVPTGELEGWRSAMSVPRHHTLTKVKGAWTVTRTPFHDLSSVKSSPLRNRNHPDGVTASFANVSSKAIHFEIDIEGIDAANPVGDINFNFTSPAGDHLDGGVVLDTGLFWLDRAGTHLYTVANSTDFTPLSNTSISVSQGRFAFSGVIDRSVLEVFLENGTQSATVTYFPTAPLDRLAVGTSGLGHGTRVGLAAWGLDSGWYDASRSE

SEQ ID NO: 344 - protein, 507 aa, Unknown
  Description of Unknown: Aspergillus wentii sequence
MRLSLLVSAVSSLSAAVVAADYSGPLRPQVHYSPPSGFMNDPNGLFFDQKKGVYHLYYQYNPNATVAGNQHWGHATSPDLYHWTNQPIALAPDSPDHYIFSGSAVIDSENTSGFFPNQTDGVVAIYTVDSPEVENQHIAYSRDGGYTFTKYANNPVLNSTSKDFRDPQVVWHPETGKWVMTIAYAHDRVIGFYTSPNLKNWTHASNFTTEIVGEEFECPNLVKFNVEAGNKHALFISVNPGAPLGGSGTFYVVGDFNGTHFSTEATKGELISFGKDNYAAQFYSELPEKSDPISIGWASNWQYTQDVPTGPLEGWRSAMTVPTVHRLVQVDGKWELSSLPFDISSVQGDSLASKDTTGDDVSVDFSTVKSNAVYFDVAINDIPNKPTGEVTFNFTSSTSRDFLDGGIHLDTGLFWINRAGTLNYTTANNPDFTPTVNTTVSPLGDSFAFSGVIDRSVFEVYLAEGKYTGTVDFFPSAPLNKLTVSVGELSQKTTVHVDAWGLKSGFA

SEQ ID NO: 345 - protein, 514 aa, Unknown
  Description of Unknown: Aspergillus wentii sequence
MHLRVSNLVSLVPALATVAQAASYDGPLRPQVHFSPPVGFMNDPNGLFLDAEGTYHLYYQYNPSAPVAANQHWGHATSHDLYHWANQPVAIGGDKPNEHIFSGAAVVDVNNTSGFFPNQTNGVVAIYTLNDEVKETQNLAYSTDGGFTFTKYASNPIIDSAVDDFRDPQVIWHPETQKWILSVAYAHDRVIGFYTSTNLKEWVHASNFTQLGLPGTEFECPNIVKFSVGPSEFKEVLFISVNPGAPLGGSGTFYVVGNFNGTHFISETPSEKLYDFAKDNYASQWWSGIPAGQDPVSIGWASNWEYCQEVPSGTLEGWRSANSVPRVNTLTKVDGDWTVTTNPFMGLSSVLGGQLAQKSIQSGNVVVDFSKVKSNAITFDIEIEGIPSSAATGEVSFNITSSQSGEYLDGALDIGTGVFWISRAGTRAFHTTNNKDFTPLFSTTVSPSANGRFMFSGIVDRSVFETFLDHGKQIGTMSFFPNSPLDTLSISASGLGGATAHVNVRALKSGWNDN

SEQ ID NO: 346 - protein, 485 aa, Unknown
  Description of Unknown: Aspergillus nanangensis sequence
MAVAKSADYSGDLRPQAHFSPPTNFMNDPNDNPDEPVAGNQHWGHATSRDLYHWDNHPIAISPTRPNEYVFSGSAVVDSQNTSGFFPDQDDGVVAIYTVDAPDAETQHIAYSRDGGYTFTKYDNNPVIDSISKDFRDPQVTWHAETGKWVLVVAYAADRVIGFYTSPNLRDWSHVSNFTQEGLPGTEFECPNLVKFSVDEGSIQEEKYVLFISVNPGAPLGGSGTFYVVGDFDGTHFHSEVQETLYDFSKDNYASQWYSGLPSDVAPISIGWASNWDYTEDVPTGPREGWRGSTTLARTHTLTKAKGSWAITQAPVNGLGPILDKCLTSQRLQSGEVSTSFSEVTSKAVYFEVTVSGIPSPNPSGHVGFKFTSSASGEYVDGGLFLETGRFWINRAGTRLFTREDNADYTSCFNTNVSVLEHGVFQFSGVFDRSVLEVFLNHGMQSGTMVFYPTAPLDTLVISVKDVSNETVVGLDVWGLKGTWR

SEQ ID NO: 347 - protein, 500 aa, Unknown
  Description of Unknown: Aspergillus heteromorphus sequence
MRLPIAALALPVAVQAANYSGPLRPQVHFSPPSDFMNDPNGLFYDAKRDLYHLYYQWNPYELIAGNQHWGHATSRDLYHWTNHPPAISPSNADEYIFSGSAVLDRNNTSGFFPDQDDGVVAIYTLDTAEAQTQNIAYSTDGGYTFTKYTHNPVIDINSTEFRDPQVTWHAESEQWLMTVAYSADKVIGFYTSPDLRDWTHASNFSRADLRGEQFECPNLVKFAADKHVLFISVNPGAPLGGSGTYYLVGNFNGTHFHPETANFTLYEFSKDNYASQWYTDLPDRSSPISIGWASNWDYAEEVPTGELEDWRSSMSVPRQHSLTQVQGVWTVTRSPYDLSAVQGRRLPNHNHTDGVSVDFSSVQSKAIYFEIDISGLPADPAGEVRFHFSSPAGDHLDGGVVLDTGLFWIDRAGTQLYTAANNTDFTPLSNTSVAVDGGLAFAGVIDRSVLEVFADDGTQSATVSYFPSAPLDRLAVGARGLSDGANVGLAAWGLDSGWVV

SEQ ID NO: 348 - protein, 365 aa, Unknown
  Description of Unknown: Aspergillus alliaceus sequence
MFRDPQVVWHPETQQWVMTIAYAQDLVIGFYTSPNLRDWTHASNYTQEGLPGDQFECPNLVKFSVDSAVSDESSKYVLFISVNPGAPLGGSGTFYVVGDFNGTHFTSEVAHETLFDFSKDNYAAQWYSGIPEDQPPVSIGWASNWDYTGEVPTGTLEGWRSAMTLPRVHNLTKVDGAWAVTHSPFNGLSTVKGRQLVSKNIQSGDVKANFSGVPSKAVYFDVAVKGIDAANPAGHVNFNFTSSSSGDYLDGGVSLGDGFFWINRAGTHLFTVKDNEKFTASSNTTIPTFGNGTFSFSGIIDRSVFEVFLGQDGIQSGTMTFFPTTPLDTLTVSAEGLSNRTSVSVKAWGLQSGWNSTAAGKRFRA

SEQ ID NO: 349 - protein, 510 aa, Unknown
  Description of Unknown: Aspergillus sp. sequence
MRFLVLSALASAAWASTSYDGRLRPQVHYSPPEGFMNDPNGLFRDANGTYHLYYQWNPTDIVAGNQHWGHATSPDLYHWTNWDAALAPSKPDEAIFTGSAVVDSENTSGFFPGQDNGVVAIYTVHSPEAETQHIAYSKDGGYSFTKYKKNPVIDSNSTEFRDPQVVWHAEIQKWVLAIAWTEDHVIAFYTSPDLKDWTHASNFTQPAIPGKQFECPNLVRFNAGDRGEQKDVLFISINPGAPLGGSGTGYLVGHFNGSHFLGEDQFKLMDFSKDYYAPQWFTNLPEDHDPVSIAWASNWQYTGEVPTGPLGGFRGADALPRVNTLQNVGGDWIVTGNPYNDLSTIRGPLLASQSVHSEDVHVDFSSVESNAVTFDVRVSHAVDPQATGEVTFNFTSSTSIDFLDGGIYLDSREFWINRAGTRGFTTADNPAFTPTFNTTVSRTPAGAFVFSGVVDRSLLEVFLNGGEQSATASFFPTAPLDELTISAKSLGEEAVVDVKVWGLESGWARK

SEQ ID NO: 350 - protein, 348 aa, Unknown
  Description of Unknown: Aspergillus leporis sequence
MTIAYAQDLVIGFYTSPNLRDWTHVSNFTQEGLPGVQFECPNLVKFAVDRAISNETSKYVLFISVNPGAPLGGSGTFWLVGDFNGTHFTSEVAEETLFDFSKDNYAAQWFSGIPDNEAPVSIGWASNWDYTGEVPTGPLEGWRSAMTLPRSHTLTMVNGEWVVTHSPFKNLSTIKGRQLASKHLKTGDVKLNFSGVPSKAVYFDVAIKGIDAANPNGHVIFNFTSSSSGEHLDGGVSLDDGFFWINRAGTHLFTIGDNGNYTPSSNTTVSWSDNGTFSFSGVIDRSVFEVFLGEDGIQSGTMTFFPTTPLDTLTVSTEGLSDRASVSINAWGLQSGWNSTRAGVRTRA

SEQ ID NO: 351 - protein, 525 aa, Unknown
  Description of Unknown: Aspergillus sp. sequence
MVDVWKRYAANNCKLLLIDKMRFLLLSVLAACAGASSNYNGALRPQVHFSPPENWMNDPSVFVDKEGIYHLYYQHNPFDVVWGNMHWGHATSPDLYHWTNQPIAIAPDNSTHGIFTGSAVVDSENTSGFFSDQDNGVVAIYTLHTPELETQDIAYSHDGGRTFTKYENNPVINIGAPEFRDPHVRWHSDISKWVMAVAYPDDLVIGFYTSPNLKDWTHSSNFSQPMPGKQVECPNLVRFDVEGGQKDVLFISINPGAPLGGSTTGYFVGHWDGHRFIADHDDYIFSDFAKDYYAAQWFPPIPGKSPISIAWASNWQYAGDLPPGKLEGFRGIQTPRVNALKKNVDGIWIVTSNPVDDLQSVKGPQMSSQSAHTGSMTVDFSDIKSNAMKYDVRVVGLDDCEISGDVSFNFTSPESGEFFEGGIHLNTREFWLDRAGTHLYTTADNPHFTPTFNTTVPSFEHGQFGFSGVFDRSILETFLDDGDQVATTRFYSKSPLTVLTVSADGLCQGALVQVKAWALESGWGS

SEQ ID NO: 352 - protein, 331 aa, Unknown
  Description of Unknown: Aspergillus viridinutans sequence
MCNRVIGFYTSPNLKEWTHASNFTQPGLPGTQFECPNLVKFSVNRADSEDPTKYVLFISVNPGAPLGGSGTFYVVGTFNGSHFSSETPHETLYDFAKDNYASQWYSGIPEDEPPLSIGWASNWNYTQQVPTGPLEGWRGSMSLPKEHTLTKVDGSWVVTNQAFDDMASVREKPLKGKPSRNGDVTFNFKDVKSNAVSFDVKINGIPSSGATGQVYFNFTSSTSGEYVDGGLRLDTGFFWINRVGTHLFTQANSTGYWPVFNTTVKSFDNGKFTFSGVIDRSLLEVSLAEGIQTGTMSFYPTRPLDTLTVSGSDLSKKTSFRVKAWGLESGW

SEQ ID NO: 353 - protein, 537 aa, Unknown
  Description of Unknown: Aspergillus viridinutans sequence
MVYFTKTLAVALVASVANAFNYDQPYRGQYHFSPQEHWMNDPNGLLYHNGVYHLFFQYNPGGIQWGNMSWGHATSKDLTHWEQQPIALLARGYGGNVTEMYFSGSAVVDVNNTSGFGKDGKPPMVAMYTSYYPVAQTLPSGKTIQENQQAQSIAYSLDDGMTWTTYDAANPVIYNPPAPYQDQYQNFRDPFVFWHAESQKWVVVTTLAALHKLAIYTSDNLKDWTLASEFGPYNAQGGVWECPGLFKLPLDGGKATKWVITLGLNPGGPPGTVGSGTQYFVGEFDGTTFTPDADSVYPGNATANWMDWGPDFYAAAGYNGLPMDAHVHIGWMNNWQYGVNIPTSPWRSAMSIPRHLALETIGAKATLVQRPQEAWSSIMSKQAAYSHTYNSVPEGSVNVGTTGETIKIDLSFSAASTASEFAIAIRASADSTQQTLVGYDFVNRQVFIDRTRSGDVSFDKTFASVYRGPLAPGVNGKVNLSIFVDRSSVEVFGGQGETTLTAQIFPSSEAVHALLVSTGGATKGVKLDMYNVASTWL

SEQ ID NO: 354 - protein, 537 aa, Unknown
  Description of Unknown: Penicillium nordicum sequence
MVHIIKALAVGLFAGIANAFDYDQPYRGQYHFSPQENWMNDPSGLLYHNGIYHLFFQYNPGGMEWGNMSWGHATSKDLTHWEEQPVAFLARGYGSNVTEMYFTGSTVADVNNTSGFGKDGKTPLVAMYTSSYPLAQTLPSGKIIQENQQSQSLAYSLDDGITWTTYDSANPIIHNPPAGYEDQYNEFRDPFVFWHEESQQWVVITALAAVHKFVIYTSDNLKDWKLASEFGPYNAQGGVWECPSLFKLPLDGGKSTKWVIAAGLNPGGPPGTVGSGNQYFVGEFDGTTFTADADSVYDGNATANWMDWGPDFYAATGYNGLAIDDHIQIGWMNNWQYGVKIPTESWRSHMSIPRHLALKTIGDKVTLVQQPQEAWSSILSKHSAYSHDYKSVREGSTAVGTTGETIKIDLSFSATSTASEFAIAIRGSTDFTEQTLIGYDFVNKQVFVDRTQSGDVSFDDTFASVYRGPLAADGDDRVNLSIFVDRSSVEVFGGQGETTLTAQIFPSADAINAKLVSTGGATQGVKLDIFNIASTWN

SEQ ID NO: 355 - protein, 538 aa, Unknown
  Description of Unknown: Penicillium polonicum sequence
MVHLKALAGLLATISGMVNAFNYDQTYRGQYHFSPQEHWMNDPNGLLYHNGVYHLFYQYNPGGIQWGNMSWGHATSEDLTHWEEKPIALLARGFGGEVTEMYFSGSAIVDVNNTSGFGKDGKPPLIAMYTSNYPVAQTLPSGKTIRENQQAQSIAYSVDDGLTWTTYDAANPVIYNPPAPYEDQYQNFRDPFVFWHEESHKWVVVTSLATLYKLVIYTSDNLKDWKLASEFGPYNAQGGIWECPSLFKLPVDGGKSTKWVIVSGLNPGGPPGTIGSGTQYFVGEFDGTTFTPDTDSVYPGNATANWMDWGPDFYASVGFNGLSADSYTQIAWMNNWQYGPNIPTSLWRSAMSIPRHLSLKSIGNKATLVQQPQEAWSSILSKHPTYSHTYSSVRQGSTYVGTNKETIKIDLSFSATSKASQFAIAVRASTDSTEQTLIGYDFVNKQVFLDRTKSGDVSFDKTFASVYRGPLASVVDGRVRLSIFVDRSSVEVFGGHGETTLTAQIFPSSEAIHTHLVSTGGDTKNVKLSIYNVASTWD

SEQ ID NO: 356 - protein, 508 aa, Unknown
  Description of Unknown: Penicillium rubens sequence
MVHIIKALAVGILAGIANAFNYDQPYRGQYHFSPQENWINDPSGLLYHDGIYHLFFQYNPGGIEWGNLSWGHATSKDLTHWEEQPVALLARGYGGNVTEMYFTGSAVVDVKNTSGFGKNGKTPIVAMYTSFYPVTQTLPSGKTIQENQQAQSIAYSLDDGMTWTTYDASNPVIHNPPALYQDQYKEFRDPFLFWHEESEQWVVIAALAAIHKFVIYTSHNLKDWNLASEFGPYNAQGGVWECPGIFQLPLDGGKSTKWILIAALNPGGPPGTVGSGNQYFVGTFNGTTFIPDADSVYSGNTTANWMDWGPDFYAAAGYNGLPIDAHVQIGWMNNWQYGANIPPSTWHGATTIPRHLTLKTIGDKEGSHYVGTTGETMKINLSFSAASKASKFAIAVRGSADFTEQTLVGYDFVKKQVFVDRTKSGDVSFDNTFASVYRGPLAAGVDGMVNLSIFVDRSSVEVFGGQGETTLTAQIFPRRDALNAKLLSTGGATESVKLDIFNVASTWK

SEQ ID NO: 357 - protein, 540 aa, Unknown
  Description of Unknown: Penicillium italicum sequence
MGLFRTMTLGILAGTASGLNYAEPYRPQYHFSPAQNWMNDPAGLLYHNGTYHLFFQYNPAGIEWGNMSWGHATSRDLTHWEERPVALLARGYPDNVTEMYFTGSAVADVNNTSGFGVDGKIPLVAMYTSMYPILQELPSGKQVRADQQSQSIAYSLDEGETWTKYDAENPVIHNPPSPYEAEFENFRDPFLFWHDDTQKWVAVTVLASLHKTLIWSSDNLKEWSLASEFGPYNAVGGVWECPNLFQMPIKGHPSAKKWVLVLGLNPGGPPGTVGSGTQYFIGDFDGTTFKADLASIHSDNKTANWMDWGPDFYAAASYNGLPHGDVIQIAWMNNWQYGALIPTSPWRSAMSVPRQLSLKKINGNLTLVQQPQRSWQSVASHRTSKHSWKSVSKGSTKLESPGKAFKIDLSFSDHDTDKSLASTFAIAVRASSDFKQETLIGYNFTSKEIFVDRRNSGVVSFDKTFASLYHAPLSASADKRIDLQIFVDWSSVEVLGGQGEVSLTAQIFPEENATEARLVSTDGVTRDVRLRINGMSSAWQ

SEQ ID NO: 358 - protein, 546 aa, Unknown
  Description of Unknown: Penicillium antarcticum sequence
MGVLLETVMALGLLASSASGLNYTEPYRPQYHFSPNKGWMNDPTGLLYHDGTYHLFFQYNPGGIEWGNMSWGHATSEDLTHWEEQPVAFLARGYPNNVTEMFFTGSAVADVNNTSGFGVDGKIPLVAMYTSMYPLSQTLPSGKEVLAEQQSQSIAYSLDNGKTWTTYDAANPVIHNPPTPYEMEYENFRDPFVFWHGETQKWIAVTALSKIYKLLIWTSTNLKDWSVLSEFGPKNAVGGVWECPNLFPLPLSSNDSDNKQITKWVMVLGLNPGGPPGTIGSGTQYFIGDFDGTTFTPDSGSVYPGNETANWLDWGPDFYAAASFNGLPAGERVNLAWMNNWQYGAAIPTDPWRSAMSIPRRLSLEMVNEKVTLLQRPHENLQSIMGHSDVSHSWNTVSEGSVDLGSLGKAFHVSLSFADHDSDSSRASEFAIAVRGSFDFEQQTLVGYNFTSKEVFVDRRVSGDVAFDGTFGSIYHTALAADCDGRVDLRIFVDWSSVEVLGGKGEVSLTSQIFPDGDSTHARLVSVEGSTGDVDIRVNGVASVWE

SEQ ID NO: 359 - protein, 536 aa, Unknown
  Description of Unknown: Penicillium steckii sequence
MVAFSKILGLSLFAIPAWAGNYKEPYRPQFHFSPAKNWINDPAGLVHHNGMYHMYFQYNPGGIEWGNMSWGHATSDDLTHWEEQPVALLARGYPESASEMFFTGSAVADVHNTSGFAVEDKTPLVAIYTSSYPIAQTLPSGKKVREEQQSQSIAYSLDDGMTWTTYDAGNPVIHNPPAPYEKQYKNFRDPFVFWHDQTRKWILVTALAEIHKLVLWSSDNLKDWQVESEFGPFNAVGGVWECPNLFPLAVDDDESNMKWVMVLGLNPGGPPGTVGSGTQFFIGSFDGKIFIPDDESVHPGNQTSNWMDWGPDYYAAASFNGLEDSDRTVIGWMNNWQYATKIPANPWHGAMAAPRHLSLKTIDEKTTLIQQPHENLRAIESNGSMLSSWKTFSEGEKGLGSVGKTMDIELEFISSDAKEFGIVLQATPDWKQQTRVGYNFANKEIFVDRTESGDTSFDKTFASVYHAPLTPNSQGVVRLRILVDWSSVEVFGGEGETTLTAQIFPSRNATFAQLFSIGGSTKNVELGIHKVSSVWN

SEQ ID NO: 360 - protein, 547 aa, Unknown
  Description of Unknown: Penicillium arizonense sequence
MGVLLETLVAVGILASTASGMNYTEPHRPQYHFSPKKNWMNDPSGLLYHDGTYHLFFQYNPGGIEWGNMSWGHATSEDLTHWEEQPVALLARGYPNDVTEMFFTGSAVADVNNTSGFGVDGKIPLVAMYTSMYPINQTLPSGKYVLAEQQSQSIAYSLDNGMTWTTYDTENPVIHNPPSTYASEYQNFRDPFVFWHDETQKWIAVTAFAEIHKLFLWSSDNLLDWSPLSEFGPKNAVGGVWECPNLFPLSVNDDESTTKWVLVLGLNPGGPPGTVGSGTQYFIGDFNGTAFTPDSESVHPENETANWLDWGPDFYAAASYNGLPGGERVQLAWMNNWQYGAAIPTDPWRSAMTVPRRLSLKMVGGKITLLQRPHENLQGVMGHRDVSHSWHSVSEGSVDLGSLGKAFHVSLSFADHDSDNRHASEFAIAVRASSGFSQQTLVGYNFTSKEVFVDRRKSGDVSFDGTFGSIYHTALSACPDGRVNLEIFVDWSSVEVLGGQGEVSLTSQIFPDGNSTNARLVSTEGSTRDVKLQLRAETAHESEVQGN

SEQ ID NO: 361 - protein, 536 aa, Unknown
  Description of Unknown: Penicillium coprophilum sequence
MNIFLVALSFLGTVSGLKYTEPYRPQYHFSPGENWMNDPSGLLYHNGTYHLFFQYNPAGIEWGNMSWGHATSRDLIHWEERSVALLARGYPDNVTEMYFTGSAVADVNNTSGFGVDGKVPLVAMYTSSYPVSQDLPSGKHIRTEQQSQSIAYSLDEGETWTRYDAENPVIHNPPSPYAAEFKDFRDPFVFWHEDTHKWISVTVLAAIHKIAIWSSENLKDWSFASEFGPYNAVGGVWECPNLFQIPIKGHPSAKRWVMVLGLNPGGPPGTVGSGTQYFIGDFDGTTFTADPGSIYPGNKSANWMDWGPDFYAAASYNGLPDGHVVQIGWMNNWQYGAMIPTSPWRSAMSVPRQLSLEVVNERVTLLQQPHHSWRSVVHHQSSKHSWKAVSKGSTRLCSPGKAVNIDLSFSDHDSDHSLASTFAIAVHASSDFKQETLVGYNFTSKEVFVDRRHSGDVSFDKTFASLYHAPLSANADNRIKLQIFVDWSSVEVLGGQGEVSLTAQIFPDGDATEARLVSDGVTRNVRLEINRMDSAH

SEQ ID NO: 362 - protein, 535 aa, Unknown
  Description of Unknown: Aspergillus caelatus sequence
MVAFLKAVGLGLLISPTWAMDYKEPYRPQFHFSPAKGWTNDPSGLVYHNGTYHLFFQHNPAGIEWGNLSWGHATSHDLTHWKEEPVALLARGFPQNVTEMFFTGSAVVDIHNTSGFGANGKIPLVAVYTSFYDVTQTLPSGKKVKANQQSQSIAYSIDDGMTWTTYDAGNPVLQHPPTPYQEQWENFRDPFVFWHEQTHKWIMVTTVAELHKLVLWTSDNLKDWEVASEFGPFNAVGGVWECPNLFPLALDNDASNIKWVLVLGLNPGGPPGTVGSGTQYFIGDFDGTTFVADNESVYPGNKTANWLDWGPDYYAAATYNGLSDTNRTVMAWMSNWQYNAKIPAYPWHGGMATPRHMSLKTIDQKPTLIQQPYKNLESIESHTRNSVWKSFAEGKKDLGSVGKTLDIDLEFSPYDAAEFGIIVQATSDWKQQTRIGYNVTSQQIFVDRTKSGDVSFDETFARVYHAPLVPSSEGIVHLRILVDWSSVEVFGGEGESTLTAQIFPSRNATFAQLFSHGGQTGNVKIGIRKVSSTWN

SEQ ID NO: 363 - protein, 527 aa, Unknown
  Description of Unknown: Penicillium vulpinum sequence
MNIFFPALSLLAGTAFGLNYTEPYRPQYHFSPAKNWMNDPNGLLYHNSTYHLFFQYNPAGIEWGNMSWGHATSRDLTHWDERPVALLARGYPENVTKMYFTGSAVADVNNTSGFGVEGKIPLVAMYTSSYPISQELPSGKYVRAEQQSQSIAYSLDEGETWTRYDAENPVIHNPPSPYAAEFENFRDPFVFWHGDTQKWISVTVLASLHKILIWSSDNLKEWSLASEFGPYNAVGGVWECPNMFELPIKGDPSAKKWVIVLGLNPGGPPGTVGSGTQYFIGDFKGTTFKPDSASIHPGNNSANWMDWGPDFYAATSYNGLPDGDVVQIAWMNNWQYGEVIPTSAWRSAMSVPCQLSLKKVEKEVILLQQPQQNWRRVVNLVNHQTFKHSWKSVPKGSTRLEPPGRAFNIDLSFSDHDYDDSLASTFAIAVRTSSDLKQEALIGYNFTSKEVFMDRRNSRDVSFDKTFASLYHGSLPSRADKPINLQIFVDWSSVEVLGGEGEVSLTAQIFPEGNSTEARLVSIDRVT

SEQ ID NO: 364 - protein, 943 aa, Unknown
  Description of Unknown: Aspergillus rambellii sequence
MPTELGHPNLSPTVPPKLAHLAEPPRFSPISKGPNIGIGDASPAPRWLIRPAPPALEQGEPDGGPEEKRPKLPPLGILRWVFDAGAAIERELDESVLYEYAYKYLQNAICDPVVRDQMRESILSGPHAEHVAYVEDPLPILPPPPKFKQVKNLEYLDIGAPESFAAPVNYLYMYPSYERPSLAARACGRQVHMIEKVDSSSSSEYSPISATSSKTPFGNSSSREEADEDGQYIRPVRRGGRLDEVYSTLPTTTFNDGNVNVLLKPELRDIVDIHAGGNERHSPQKERRGQRQDRTIEEWKPSYDVSSSSEDEELLPSPTSPPPRVKRQAKKAQPKKAQPKNKAKKVQKKVQKKTSTTEIHLEIEESGEMSAILGSPCAKNTRVLMSVRGLCKALVSGSLVSRAWASASLYEERGAKTYTEPFRPQYHFSPAQNWMNDPNGLVYVNGTYHLFYQYNPGGIVWGAMSWGHATSDDLTHWEHQPLAFLARGFPDNMTEMFFSGSAVVDEQNTSGFGNGDAAPLVAMYTSNYLTDQTLPSGKQVRESQQSQSIAYSTDQGKTWTTYDEANPVILEPPAPYKDQYQQFRDPNVFWHHETNQWVLLVSLASLHKLLIYTSKDLKSWSLVSEFGPFNAIGGVWECPSLFPLPLDNDESKVKWVALVGLNPGGPPGTVGSGNQYFIGDFNGTTFTPDSASVYPGNEEANWLDHGPDFYAAIGYNGLPEYERTLIAWMNNWQYGQKIPTSPWRSAMSIPRQLSLKTINGKAMVVQNPKEDWDSIMAKSGSGSHGSSYRSVAQGVQKLGSLGKAFAVELTFSDRDVNPSSTGTSEFGIALRATKNFTEQTRIGYDFAEKRVFVDRAKSGDVSFDETFASSYSAPLAPAADGTVSLRIFVDWSSVEVFGGQGETTITAQIFPSEDATYAQLFSEGGSAKNVRLRTRKIHSTWRK

SEQ ID NO: 365 - protein, 559 aa, Unknown
  Description of Unknown: Aspergillus ochraceoroseus sequence
MSVRGLCKALVSGSLVSRAWASASLYEERGAKTYTEPFRPQYHFSPAQNWMNDPNGLVYVNGTYHLFYQYNPGGIVWGAMSWGHATSDDLTHWEHQPLAFLARGFPDNMTEMFFSGSAVVDEQNTSGFGNGDAAPLVAMYTSNYLTDQTLPSGKQVRESQQSQSIAYSTDQGKTWTTYDEANPVILEPPAPYKDQYQQFRDPNVFWHHETNQWVLLVSLASLHKLLIYTSKDLKSWSLVSEFGPFNAIGGVWECPSLFPLPLDNDESKVKWVALVGLNPGGPPGTVGSGNQYFIGDFNGTTFTPDSASVYPGNEEANWLDHGPDFYAAIGYNGLPEYERTLIAWMNNWQYGQKIPTSPWRSAMSIPRQLSLKTINGKAMVVQNPKEDWDSIMAKSGSGSHGSSYRSVAQGVQKLGSLGKAFAVELTFSDRDVNPSSTGTSEFGIALRATKNFTEQTRIGYDFAEKRVFVDRAKSGDVSFDETFASSYSAPLAPAADGTVSLRIFVDWSSVEVFGGQGETTITAQIFPSEDATYAQLFSEGGSAKNVRLRTRKIHSTWRK

SEQ ID NO: 366 - protein, 506 aa, Unknown
  Description of Unknown: Penicillium roqueforti sequence
MGILLALALGLLGTASGLDYTEPYRPQYHFSPAENWMNDPNGLLYHDGTYHLFFQYNPAGVEWGNMSWGHATSSDLTHWEEHPIALLARGYPNEVTEMFFSGSAVADVNNTSGFGVDGKIPLVAMYTSSYPVSQDLPSGKSITAGQQSQSIAYSLDEGETWTTYDAENPVIHNPPSPYEAEFENFRDPFVFWHGDTQKWIAVTTLASLHKLLIWSSDNLKEWSLASEFGPYNSVGGVWECPRTQYFIGDFDGTTFQADPASIYPGNSSANWMDWGPDFYAAASYNGLPNGDVVQIAWMNNWQYGTEIPTSPWRSAMSVPRQLSLQTINGKVTLVQQPQQNWQSVANHQTLQHSWKSVSKGSTKLNSPGKAFKIDLSFSDHDSKKSLASTFAIAVRASSDFKQETLIGYNFTSKEVFVDRRNSGDASFDDTFATLYHTSLSAGADKRINLQIFVDWSSVEVFGGQGEVSLTAQIFPKEDATEARLVSTDGVTQNVKLQINGINSAWH

SEQ ID NO: 367 - protein, 514 aa, Unknown
  Description of Unknown: Penicillium sp. sequence
MGIFLMALGLLAGTASCLNYTEPYRPQYHFSPAENWMNDPAGLVYYNETYHLFFQYNPAGIEWGNMSWGHATSKDLTHWEEHPVALLARGYPENVTEMYFTGGAVADVNNTSGFGVEGKIPLVAMYTSMYPVSQELPSGKHVLAEQQSQSIAYSLDEGETWTTYDAENPVIHNPPSPYGAEFENFRDPFVFWHDDTQKWVAVTVLASLHKVVIWSSDNLKEWSLASEFGPYNAVGGVWECPNLFQMPIKGNPSIKKWVLVLGLNPGGPPGTVGSGTQYFIGDFNGTDFKADPASIHPDNKSANWMDWGPDFYAAASYNGLPEGDDVVQIAWMNNWQYGATIPTSPWRSAMSVPRQLSLKKVNGKVTLLQQPQYSWRSVANHQTLKHSWKSVSKGSTSLESPGKAFKIDLSFADHDSDKSLASTFAIAVHASSDFKQETLIGYNFTSKEVFVDRRNSGDVSFDKTFASLYHAPLSANADKRINLQVFVDWSSVEVLGGSRRGLFDGSDIPRRKFN

SEQ ID NO: 368 - protein, 544 aa, Unknown
  Description of Unknown: Aspergillus puulaauensis sequence
MRTGRFLHSALSTMSLAGQALALAYSEPYRPQYHFTPARGWINDPNGLVYADGTYHMFYQYNPGGTGHGNISWGHATSEDLTHWDEQPVALLARGFPGNVSEMFFSGSAVVDVRNTSGFGVGGESPMIAMYTSYYPVSQTLPSGKRVRTDQQSQSIAYSLDQGETWTTYDEANPVLLEPPASYRDQYKNFRDPNIFWHEETGKWVLVTALSELHKLLIYTSDNLKDWSFASEFGPYNAIGGVWECPSFFPLPVDGDESNVKWVAIIGLNPGGPPGTVGSGNQYILGQFNGTAFIPDKESIHTVGTANWFDYGPDFYAALVYNGQPEYQRTVIAWMNNWQYSDKIPTSSWRGAMAIPRRIALKTVNGNVTLAQEPEEDWDAITSEAHTSHFESLPEGTHSLGPLGKALEVNLTFSDRNTNPSSSRSPSDFGISLRATQNSTQQTRIGYDFATEQVFVDRRRSGNSSFDETFASIYHAPLSPAEDGTVALRIFVDWSSVEVFGGQGETTVTAQIFPDEKATYARLFSTGGSTDDVQLSVREVESVW

SEQ ID NO: 369 - protein, 548 aa, Unknown
  Description of Unknown: Aspergillus calidoustus sequence
MPRKDILRSALLGTLASQSLAEPYHEPYRPQFHFSPGRGWMNDPNGLLYVNGTYHMFYQYNPAGTTWGNISWGHATSEDVTHWEHQPVALLARGFPDNVTEMFFSGSAVADERNTSGFGRGGDGDGDTAPLVAIYTSYYPISQTLPSGKKVRENQQSQSIAYSLDQGQTWTTYDEANPVILEPPTAYGDQYQEFRDPNVFWHEPTGKWVLVVSLAKVHKLLVYTSDDLKNWSVASEFGPYNAVGGVWECPSFFPLPVDGDESNVKWVAIIGLNPGGPPGTVGSGNQYILGDFNGTVFTPDQGSIHTDGEANWLDFGPDFYAALVYNGLPEYQRTVIAWMNNWQYATEVPTSTWRSAMAIPRRISLKTINGKMRVVQEPEENWNSITSKLQTAYFASLPEGVHNLGSLGKSLAINLTFSDRNDANSSAASEFGIAFLGTQNFTQQTRVGYSFATKQVFLDRRTSGNSSFDGTFASIYHAPLLPSEEDKVTLRIFVDWSSVEVFGGQGETTLTSQIFPREDATYARLFSSGGLTENIDLSVSEINSVWRR

SEQ ID NO: 370 - protein, 532 aa, Unknown
  Description of Unknown: Aspergillus calidoustus sequence
MLASPQVASAAPPGHKAYTELYRPQYHFSPAKNWMNDPNGLIYHDGVYHLYYQYNPGGTTWGAMSWGHATSRDLTQWTEHPVALQARGFPDNITEMYFSGSIVVDERNTSGFGKKGKVPWVAMYTSYYPLEQTLPSGKHVRKDQQAQSIAYSLDQGMTWTTYDAANPIIAEPPAPYQDQVLEFRDPNVFWHDETRQWIAVVSLAKLHKILIYTSNNLKDWKLASEFGPVNAVGGVWECPSIFPLSLDGGDDLKWILMLGLNPGGPPGTVGSGSQYIVGNFNGTTFTADPESIYTPEDQDSQVANWLDHGPDFYAALGFNGLPQDKRTVIAWMNNWQYGGVIPTDPWRSAMSAPRHLELKTIDGKATIVSEPAARLKTQGGRTFTFRRLDGERELGRLGKALEIELSFSRKATEGEFGIALAATKDYSQETRVGYDFAAGQVFVDRSRSGEVGFDGTFASRYYAPLSLGADGRVSLRIMLDWSSVEVFGGDGEATITSQIFPSKDAVYSRLFSTGGETGNVKVGVKEVRSAWR

SEQ ID NO: 371 - protein, 505 aa, Unknown
  Description of Unknown: Aspergillus versicolor sequence
MNDPNGLLYDEGVYHLYYQYNPGGNTWGAMSWGHATSEDLLHWTEQPIALEARGYPDEITEMFFSGSAVVDEGNTSGFGDNGTVPWVAMYTSYYPTEQTLPSGKLVRANQQAQSIAYSLDKGLTWTTYDAANPVILDPPAPYQDEFPEFRDPNVFWHEGTERWVAVISLAKLHKILIYTSDDLKEWELASEFGPVNAVGGVWECPSIFPLRLDGGNSEKWVLLLGLNPGGPPGTVGSGTQYIVGSFNGTTFTADPDSVYDGSGSTDQEANWLDWGPDFYAALGWNGLPTAERTVIAWMNNWQYGAAIPTDPWRSAMTVPRRLALKTIGGKATLVQQPAGEWKSITPGGNSTTFPRVDGVRELGRIGKTLEIDLTFSSRQESSSGNSSEFGIVVAATQDYTEQTRVGYNFGTQEVFIDRSQSGEVSFDDTFASTYYAPLSAPSNGIISLRVYVDWSSVEVFGGQGEATITSQIFPSTEAVYGRLFSSGGATSNVTLGVKELRSTWE

SEQ ID NO: 372 - protein, 528 aa, Unknown
  Description of Unknown: Aspergillus alliaceus sequence
MLPSARYALALGLCAFGAVSAQSYTELYRPQYHFTPAKNWMNDPNGLIYHNDIYHLFYQYNPGGATWGAMSWGHATSKDLIHWEHQPVALLARGYPDAITEMFFSGTAVADVDNTSGFGTNGSTPLVAMYTSYYPQEQVLPSGKSVAANQQAQSIAYSVDDGMTWNTYDAGNPVIAELPAEYADQILEFRDPSVFWHQSSGKWVAVVSLAKLHKLLFYTSTDLKAWKYVSEFGPANAVGGVWECPSIFPLPLDGDDQNLKWVAQIGLNPGGPPGVTGSGTQYIVGSFDGTSFTADPESVQQTNWLDYGPDFYAALSFSGLPTNDRVDIAWMNNWQYAAAIPTDPWRSSLTVPRKLSLATINGTATVVQQPIVQEQNSIPRRWSSIPAGITKLNATGKAIDATLSFSRSTATQFGLVFRASADMSEQTSIGYDFTTEQLFVNRTQSGETGFDGSFSSVYYAPLHSSDGNITLRALVDWSSVEVFGGVGEVSLTAQIFPSDDSVDTYLFSTGGSTSGVELRVQQAQSVWN

SEQ ID NO: 373 - protein, 601 aa, Unknown
  Description of Unknown: Aspergillus mulundensis sequence
MAAGELSENLDDDHTCCGVGLQSMHQDQAAQSHKRRPEVDILYGSPQVQSARNMRPHTLLSSTLAAQAAARALSPTPSPSPAGVSYTEQYRPQYHFTPARNWINDPNGLVYANGTYHLFYQYNPGGVAHDAISWGHATSKDLTHWDEKPVALTAKGFPGTVTEEFFSGSAVVDEQNTSGFGNGTVPPMVAMYTSFYVYDQILPSGKKVYANQQSQSIAYSLDSGLTWNTYDAANPVLLHPPHPYEAQYKEWRDPNVFWHADTNKWILTTALSDLHKLLIYTSDDLKNWTFASEFGPYNAVGGVWECPSFFSLPVDGDEENVKWVALIGLNPGGPPGTVGSGNQYILGQFNGTHFIPDAESVHEEGVANWLDYGPDFYAALVYNGLPEFQKTVVTWMSNWQYAQKVPTTIWRNAMAIPRRLKLKTIKERVVVVQEPQEDWAAITSKPKTTHIESLAANSTRNLGFLGKTLAVNLTFSAEDEDASSFGISLLATQNFTTQTRIGYDFAEKQIFVDRRTSGNVSFDETFASVYTAPLEPADDGTVTLRIFADWSSVEVFGGQGETTVTAQVFPPEGATYARLFTGDAGVEDVLLSVSEVASVWK

SEQ ID NO: 374 - protein, 1203 aa, Unknown
  Description of Unknown: Aspergillus nidulans sequence
MVGGDHRSLIESIYNAPANLLSVVACSGSAVGQCLSPAKFDILVPTSSRIASTKLPTSANTSPTLISSNCYGKTAAKQKMAARPQTAKKSKRDRKKAWKKDPWKGKVADLSHPPYRKAKMEGKLPGPNPDEHVRPSVPTSNHVARAAQRMKYWPERQRLSPIQSPELDAPTLVNGKELGLPELNRDAKPALNPVDRIPPTRFPRVYVGDNAPTPRWLIRPVRPVTNHESAHNSSSESGSAASGFSSASGSSRLLPLGRLRWEFDPGPAAKHGQDEARLHEYAYRYLQNSLRDPIVREEMRNMIWNSPYALVVANVEDPLPIPPPPPHFKDQRPSDYAALREAISASNPDDYHFKYPDYARPSLAARTYGHQDTYKSRKSSVDSQSSAVSHGSSSTGESSRTRASSSSSISIVHKELSPVYQHEFDDDTNHYLKRGQKVGFKAKIKTKEKNQTESFLSKPPRRGRGRPTKSDIDFLDVPTLEELSSAEPPRKKRAGVEKPARDMWRPLSETFSEEEDIITPKAPKITSKNAAKAKMDGAILNKRTGGWLVSVYAEYESCLPCWQELISFPTLEDTKSGQIPADYAKHDLGTYLVCAEVAKRQEQLALGWLSASVIHPHGFLPTRRPGYSEGVIPREYSALLLGSRGQTLRAVSDITKMRARTLLLRVSIFSAALALQPSAPGPAPYTEPYRPQYHFTPAQNWINDPNGLLYHNGTYHMFYQYNPGGVAHEAMSWGHATSQDLTHWDERPVALTARGFPGKNISEQFFSGSAVYDVDNSSGYGNGMGTAAPMVAMYTSFYVYGQTLPSGKKVRASQQSQSLAYSLDSGETWTTDDAVNPILLQPPHPYESQYKEWRDPNVFWHAPTKKWILTTALSDLHKLLIYTSTDLKNWTLASEFGPYNAVGGVWECPSFFPLPVDNDESNVKWVAIIGLNPGGPPGTVGSGNQYILGQFNGTHFLPDAESLHEQGEANWLDYGPDFYAALVYNGLPEFQRTVIAWMSNWQYAEKVPTTVWRNAMTIPRRLGLKTINGKVLVVQEPEANWAAIMSKPQTTRILSLPANSTRNLGSLGKTLAANLTFSAGEQNGSSFGISLLATQNFTTQTLIGYNFATKHIFVDRRASGNTSFDETFASVYRAPLEPADDGTVTLRIFADWSSVEVFGGQGETTLTAQVFPPEGATHARLFANGAGVEDVLLSVSKVGSVWN

SEQ ID NO: 375 - protein, 532 aa, Unknown
  Description of Unknown: Aspergillus arachidicola sequence
MFSTIMFMYYALAIGASAFGVVSAESYTELYRPQYHFTPASNWMNDPNGLLFHHGTYHLFYQYNPGGDTWGAMSWGHATSTDLVHWKHQPVALLARGYPDKITEMFFSGTAVADTQNSSGFGINGTTPLVAIYTSMYPQAQILPSGKSVEANQQAQSIAYSLDDGMTWTTYDAGNPVILAPPADYADQILDFRDPSVFWHSGSGQWVAVVSLAKLHKLVIYTSTNLKEWKHVSEFGPANAVGGVWECPSLFPLPLDGDDESLKWIVQLGLNPGGPPGTTGSGTQYFVGDFDGTSFTPDPKSLEETNWMDWGPDFYAALSFGGLPTEDRINIAWMNNWQYAAAIPTHPWRSASTIPRRLSLRTLNGTATLVQEPIVQQQSSYRRHWSSVPEGTTRLNMTGKTLDATLSFSESTSTEFGLIVRASEDMSEQTRVGYNFATKQIFVDRTKSGESGFDGTFPDMYHAPLVTNEETITLRVLVDWSSVEVFAGTGEAVITAQIFPRNDSVGMRLFSTGGKTSGVELRAHQVPSVWSV

SEQ ID NO: 376 - protein, 565 aa, Unknown
  Description of Unknown: Aspergillus nanangensis sequence
MKLSLLVQTVLAAATAIPAVAADYTEPYRPQYHFSPAKNWMNDPNGLVYDATEDVYHLFFQYNPGGMTWGAMSWGHASSPDLMHWTEHEVALLARGYPQNITEMYFSGTVVIDEENTSGFGGDEGEIPWIAMYTSYYPMEQVLPSGKETQENQQAQSIAYSLDHGMTWTPYDAGNPVIANPPSAYKDQFKEFRDPSVFWHEETSRWVAVVSLAQLHKIVIYTSRDLKQWDEASEFGPANAVGGVWECPSIFPLSLDGSHTTTKWVLMLGLNPGGPPGTVGSGSQYIVGEFDGTTFTPDASSIYDGSGPADSVASDSTANWVDRGPDFYAALGFNGLPQDQRTVIAWMNNWQYGQTVPTDPWRSAMSIPRRLSLKTIDGKATLVQEPVGVPRGSSSRSRSSRRHRASRLLRRVKAGSTVDLGGIGNTLEIELSFSSSLSGNSTATTTTEFGIVVAATQDSHYETRVGYDFASQQVFVDRTRSGDVSFDGTFAGVYYAPLAPAANGTVSLRVLVDWSSVEVFGGVGEVSITSQIFPVEGAGYGRLFSTGGDAENVRLQVKDLASTWE

SEQ ID NO: 377 - protein, 556 aa, Unknown
  Description of Unknown: Aspergillus homomorphus sequence
MALSLLYTLLLGTTAAAEPYTEPYRSQYHFTPRKNWMNDPNGLLFHNNIYHLFYQYNPNGTDWGAMSWGHATSTDLHHWEEQPIALLARGYPDTITEMYFSGSAIADVHNTSGFGTDESPVPLVAVYTSFYPKTQTLPSGQNVQANQQAQSIAYSLDNGTTWTPWDAGNPVIPTPPAPYSTQDTQEFRDPFVFFHEPTNKWIAAVSLATQHKIAIYTSDNLKTWTQTSTFGPFNAVAGVWECPNLFPLQLDDDPAQIKWVAQISVNPGGPPGTVGSGTQYVVGMFDGERFVPDEGGIYTSNNTEGNATQVEANWVDNGPDFYAPTSFNGLPSGERIDVAWMSNWQYAAKTPEKGWRGAFTLPRRLGLRTVNGRVRLVQEPVVDLAQLGIARSEAAAGSVDIYNQTWTTLPQGTTTLPVSGKTLEVSLQFSARNKTAARVGITALATPDRSQQTQIGYDFEAQEVFLDRTQSGDGSFDATFASVYHAPLTPDCNGTVSLRVFLDWSSVEVLGGSFGETSLTARVFPSKDAKGLFLFAEGGDVRDVGVIVRRIGSVWR

SEQ ID NO: 378 - protein, 703 aa, Unknown
  Description of Unknown: Aspergillus novoparasiticus sequence
MSSLEPQYLEATRARTGGEGNASYTEPYRPQFHFTPPKNWMNDPSGLLYHEGIYHLFYQYNPGGTTWGAMSWGHATSRDLTHWEQQPVALLARGYPNNITEMFFTGSAVVDVDNTSGFGHSGKTPLVAMYTSYYPYAQTMPSGKTVQANQQAQSIAYSLDDGMTWTTYDAANPVISDPPVPYSDQFLNFRDPNIFWHKPTKKWIAVLSLAELHKLLIYTSKDLKNWTLASEFGPVNAVGGVWECPNLFPLPVDGDDNNVKWVAMIGLNPGGPPGTIGSGTQYVVGNFDGTTFTAETDSLYSGTTPPPGGSIVFADFEGAGSFADLGWTPAGDLIGQSPVNGTLPGQNPVTGYLGKRLISTFLNGDATTGTLTSKSFAISKRYINFLIGGGQDFNNTAVHLKVDGQIVRSATGTNSESLSWQSWDVGSFLNQTAMIQIVDRSSGAWGHINIDEISFSDSMVRSQVANWVDWGPDFYAAQGYNGLPPDEHIAIGWMSNWQYGGLVPTSPWRNAMSIPRKFSLKTIDGKATLVQAPTEKWGSIVSRKGLDQSWPSLPQGTKSLGSVGKALQIELSFSDREPAAAEASQFGIIVRATPDLKQQTRVGYDFATKEIFVDRSHSGDVSFDGTFPATYFAPLAPNATGQINLRIYVDWSSVEVFGGEGETTLTAQIFPSDSATHAQIFSTGGDTQNVRIGINEISSAWDD

SEQ ID NO: 379 - protein, 706 aa, Unknown
  Description of Unknown: Penicillium brasilianum sequence
MIVMLKALLLGLGAFQAVSAEKPSHTELYRPQYHFTPPKNWMNDPNGLLYYKGIYHLFYQYNPGGTTWGAMSWGHATSRDLTHWEQQPIALLARGYPHNITEMFFSGSAVADVGNTSGFGHSGKTPLVAMYTSYYPYAQTMPSGKTVQANQQAQSIAYSLDDGMTWTTYDAANPVILDPPAPYSDQFLNFRDPNIFWHKPTKKWIAVISLAQLQKLLIYTSKDLKNWTFASEFGPVNAVGGVWECPNLFPMSVDGGSGNDSVKWVVMIGLNPGGPPGTIGSGTQYVVGSFDGTTFTADADSLFSGTTPPPSDSIVFADFEGTGNFADLGWTPTGDFIGQSPVNGTLSGQNPVTGYLGKRLVNTFLDGDATTGTLTSQSFAISKRYINFLISGGHDLNNTAVYLKVDGQIVRSATGTNSENLSWNSWDVGSLLNQNAVIQIVDTAAGGWGHINVDEISFSDSMARNQVANWVDWGPDFYAAQGYNGLSPDEHIAIGWMNNWQYGGLIPTSPWRSAMSIPRELSLKKIHGKATLVQAPKEKWDSILSRKGIDQSWSSLNQGTKSLGSVGKALRIELSFSDRDPAAVGASQFGIIVRATPDHEQQTRVGYDFTTKEIFVDRSHSGDVSFDGTFPATYYAPLAANAEGQINLRVYLDWSSVEVFGGEGETAMTAQLFPSDNATYAHIFSTGGSTQNVRIRINKISSVWGL

SEQ ID NO: 380 - protein, 702 aa, Unknown
  Description of Unknown: Aspergillus burnettii sequence
MGLFLHHALLLGLAAGQAAATRNYTERYRPQYHFTPEKNWINDPNGLLFYNNLYHMFYQYNPNGTEWGALSWGHATSTDLSHWEHQPVALLARGYPGEITEMYFSGSAVADVNNTSGFGTDGKVPLVAIYTSFYPQAQRLPSGKYVRENQQSQSIAYSLDEGLTWTRWDAGNPVILDPPVPYEDEYKEFRDPFVFWNGPTQKWVGLVAISKQHKIAIYTSDNLKDWTYVSEFGPFNAVGGVWECPNLFPLPLDGDNSNVKWIAQISLNPGGPPGTIGSGTQYTVGSFDGITFTPDAENIYPDVTPPPADSVIFEDFEGTGDFTALGWTATGGLIGASPAEGAIGDQQIVSGYMGRRLLNTFLDGDSTTGTLTSPSFTISHRYINFLIGGGYSRSQTSVNLKIDGQVVRTATGHNSESLVWHGWDVSALTGQTATIEVIDSADGGWGHINIDEISFSNTLARSQIANWLDYGPDFYAATSFNGLLQDERIDVAWMSNWQYAAATPEEVWKGAYALPRKLSLRTINQKPMLVHEPMGDWADLIQQDGYSKAWDKVPEGTTALAVSGQTMEINLSFPDREAAPDEVARFGVIALAMSDLSEQVQVGYDFASKQLFIDRTKSGNVTFDATFPEVYYAPHSADRDGNINMRIFVDWSSVELFGGDGETSITARVFPTENATHSHIFSFGGGTENVKIRVRNIESVWA

SEQ ID NO: 381 - protein, 702 aa, Unknown
  Description of Unknown: Aspergillus hancockii sequence
MKVSILLKAILLEGLASHVEAAQPREAYKEHYRPQFHFSPSRNWMNDPNGLLYANGTYHMYYQYNPNGTTWGAMSWGHATSMDLTHWEEQPIALLARGFPDHITEMFFSGSTVIDEQNTSGFGSQGQTPWVAMYTSYYPLKQTLPSGKNVRENQQAQSIAYSLDQGATWTTYDEGNPIILDPPAPYQDQYLDFRDPNVFWHPETQSWVAIVSLAKLRKLLVYTSRDLKQWAVVSEFGPFNAIGGVWECPNLFPLPLDGDESNVKWVAIVGINPGGPPGTVGSGTQYFVGDFNGTTFMPDLDTIHDGSTPKGSVVFQDFEGNRSFAERGWATTGDFIGTVPVAGTLPGQNAVTGFLGKQLVNTFLNGDSTMGTLTSPSFKISYKFINFLIGGGNNINETAIRLKINGGIVYAATGSNNEQLTWQSWDVSAFQNQSAVIEIVDFATGGWGHINIDEISFCNSPATNDNGNWLDRGPDFYAALVYNGLSQYQKTIMAWMNNWQYGGLIPTAPWRSAMTIPRRLSLKNVGQRATLVQEPEGNWKSITQGSSVSSFPSVTGVRSISDIAKAAQIEVTFSNREAAATGNPEFGIIFKATKDFSQQTRVGYDFTTKQVFIDRTKSGDVSFDNTFGSVYYAPLSPSSDGTVTLRIFVDWSSVEVFGGQGETTITTQTFSSDNATSAQLFSFGGSTKNVQLRVSELRSSWE

SEQ ID NO: 382 - protein, 268 aa, Unknown
  Description of Unknown: Aspergillus hiratsukae sequence
MAAIGSGTQYFVGEFDGTTFTPDADSVYPGNATANWMDWGPDFYASAGYNGLPMDAYVHIGWMNNWQYGQNIPTSPWRSAMSIPRHLTLETIGAKATLVQRPQEAWSSIVSKQAAYSHTYNSVPEGSVNVGTTGETIKIDLSFSAASTASEFAIAVRASADSTQQTLVGYDFVNKQVFIDRTRSGDVSFDKTFASVYRGPLAPGVNGKVNLSIFVDRSSVEVFGGQGETTLTAQIFPSGEAVHARLVSTGGATKGVNLKIYNVASTWH

SEQ ID NO: 383 - protein, 699 aa, Unknown
  Description of Unknown: Penicillium polonicum sequence
MKLGTAFFLGALAFGVSADRPSKAYTEPYRPQFHFSAEKNWLNDPNGLVYDDGVYHLFFQYNPGGDTWGAMSWGHATSKDLLHWTEQPVALEARGFPNNITEMFFSGTAIVDEKNTSGFGRQGKAPWVAMYTSYYPTEQTLPSGKHVRTNQQAQSIAYSLDKGMTWTTYDAANPVILDPPAPYQDQFPEFRDPSVFWHEDTERWVAVISLAKLHKVLIYTSQDLKKWDLASEFGPANAVGGVWECPSIFPLSLDGGESQKWVLMLGLNPGGPPGTVGSGTQYIVGNFNGTTFTADSDSVYDGSGPTDGVIFEDFEGDKTLADRGWITTGDFVGASPAKGTLDGQNTVTGFKGKQLLNTFLNGDATTGTLTSKPFDISQRYINFLVGGGSNTNKTAIQLKVNGQAVRTSAGSDSETLSWKSWDVTALQGKSGTIEIIDNATGGWGHINVDEISFSNTRANSQVANWMDWGPDFYAALGWNGLAQDERTVIAWMNNWQYGATIPTDPWRSAMTIPRHLALKTIGGKATLVQEPAGKWESITRGRNASTFPRVDGVRELGRIGKALAIDLTFSNRRPSLSGNSSEFGIVVAATKDYTQQTRVGYNFDTQEVFIDRSRSGDVSFDATFADTYSAPLSPSANGSVSLRVYVDWSSVEVFGGQGEATITSQIFPSTEAAYGRLFSTGGATSNVTLRVKEVRSTWQ

SEQ ID NO: 384 - protein, 702 aa, Unknown
  Description of Unknown: Aspergillus lentulus sequence
MKFPLSTTALLVGMMSSAVLATATHHESYKELYRPQYHFSPARNWMNDPNGLVYHDGVYHLYYQYNPGGTTWGAMSWGHATSRDLMHWTEHPVALQARGFPGNITEMFFSGTVVVDEDNTSGFGRRGEAPWVAMYTSYYPMEQVLQSGKRVRKDQQAQSIAYSLDKGMTWTTYEAANPVIADPPAPYQDQYLDFRDPSVFWHRETRRWIAVISLAKLHKIVIYTSRDLKHWDLASEFGPANAVGGVWECPSIFPLSLDNGKTTKWVLMLGLNPGGPPGTVGSGSQYIVGNFDGTTFTADPESIHDGSGPEDSVVFEDFEGDQSFAARGWRTTGNFTGASPVKGTLAGQNPVTGFLGEQLVNTFLDGDATTGTLTSAPFNISHRYINFLVGGGNNINDTAIRLHVDGNIVHSSTGSNSEGLSWSSWDVSALQGKRAEIEIVDNATGGWGHINVDQILFSDTQATNNVANWVDWGPDFYAALGFNGLAQDERTVIAWMNNWQYGAAIPTDPWRSAMTIPRHLALKTIGGKATLVSEPAGKWNALTDGGRVFSFRRVEGTQDLGRLGKTLEIQLTFSSRQASSTERAEFGIALAATRDHSQETRVGYEFATQQIFVDRTRSGNVSFDATFAGTYYAPLSPGADGTVSLRILLDWSSVEVFGGQGEATITSQIFPSKDAVYSRLFSNGGETSDIKVRVREVRDTWQ

SEQ ID NO: 385 - protein, 703 aa, Unknown
  Description of Unknown: Aspergillus fumigatus sequence
MKLSALVQPLVLGMSASAAARPSRPSAYTEPYRPQFHFSPEKNWMNDPNGLVYDAKEGVYHLYFQYNPGGTTWGAMSWGHATSKDLMHWTEHPVALRAKGFPDNITEMFFSGTVVIDERNTSGFGRNGKTPWVAMYTSYYPMEQVLPSGKRVKTNQQAQSIAYSLDRGMTWTTYDAANPVIAEPPTPYEDQYTEFRDPSVFWHDETHQWVAVISLAKLHKILIYTSRDLKHWDLASEFGPANAVGGVWECPSIFPLSLDGSKKTKFVLMLGLNPGGPPGTVGSGTQYIVGDFNGTTFTPDANSIYDGRGPEDSVIFEDFEGDKTLAARGWTATGDLTSASPAKGTLPGQNPVTGYLGQQLLNTFLNGDATIGTLTSSPFEISHKYINFLVGGGSNLNETAIRLKVNGQTVHTSTGSNSEGLAWQSWDVSALQGKTAVIEIIDNSTGGWGHINVDQISFSNQPATSTIANWMDWGPDFYAALGFNGLPQDKRTIIAWMNNWQYGGVIPTDPWRSAMSVPRQLALKTINGKATIVQEPAGKWSALTHGGQTFSFPRVEGVRGLGRIGKTLELELTFSSRQSPAAGKAEFGVAVAATKDYSHETRVGYNFATQQVFVDRTRSGDTSFDGTFASVYHAPLAPSADGTVSLRVLVDWSSVEVFGGNGEATITSQIFPASDAVYGRLFSTDGETRNVKLRVKEVRSTWQ

SEQ ID NO: 386 - protein, 699 aa, Unknown
  Description of Unknown: Aspergillus calidoustus sequence
MLRNLLKTLVLGGLAFPLAEGRASQSRTELYRPQFHYSPKRNWMNDPNGLVYEDGVYHLYYQYNPGGDTWGAMSWGHATSRDLAHWTEHPVALQARGFPGNITEMFFSGTVVVDERNTSGFGRRGKAPWIAMYTSYYPFEQTLPSGKTVRKDQQAQSIAFSLDKGMTWTTYDAANPVILDPPAPYGDQQLEFRDPSVFWHEETRKWVALVNLAKLHKVLIYTSKNLKDWTLASEFGPANAVGGVWECPSLFPLKLDGSRAAKWVLMLGLNPGGPPGTIGSGTQYIVGQFDGTTFTADPESLYDGSGPEDSVILEDFEGDLSFADRGWTATGDFTGASPAKGTLANQNPVTGYLGTQLVNTFLEGDATTGTLTSPPFNISHKYINFLVGGGSNVNETAIRLKVDGSIVHASAGTNSEGLSWQSWDVGSLQGKSAAVEIIDTATGGWGHINVDQISFSDTRATNTIANWLDYGPDFYAALSWSGLPQDKRTIVAWMNNWQYASLIPTNPWRSAATVPRQLSLKTVNKRPTLVQEPIDNWKTHSNKVSKFPRVDGVRDLGRIGKTLEIELTFDSRQPAAGAEGADFGIIVAANKDFTQYTRVGYDFAAQQVFVDRTLSGDVSFDGTFAGVYSAPLAPSRDGRVALRILVDWSSVEVFGGQGEASITSQIFPAKDAGYARLFSTGGKTADVTLRVGEVRSTWR

SEQ ID NO: 387 - protein, 719 aa, Unknown
  Description of Unknown: Aspergillus brasiliensis sequence
MGLLHLPYSFLLGISAVQAAVTGDYTERYRPQYHFTPEKNWINDPNGLLFYENVYHLFYQYNPNGTEWGALSWGHATSADLSHWEHQPVALLARGYPGEITEMYFSGSAVADVNNTSGFATEDGQVPLVAMYTSFYPQAQLLPSGQRVRDKQQSQSIAYSLDNGTTWTQWDAGNPVILNPPSPDEAEYQEFRDPFVFWHDATQTWVSLVAISKQHKIAIYTSTDLKQWTYASAFGPFNAVGGVWECPNLFPLPVDGDESNIKWVAQISLNPGGPPGTVGSGTQYVVGNFDGTRFTPDDEGIYSEDATPPPTDSVVFENFENDGDFESLGWTASGKLVGASPAEGALGGQQNVTGFLGHRLLNTFLDGDQTTGTLTSPPFTISHRYINFLIGGGFNRNGTSINLKCEINGTSQTVRTATGHNSERLEWTGWDVSALQGRTATIEVVDTATGDWGHITVDEISFSNTTLARSRTANWVDFGPDFYAATSFNGLPRDERINIAWMSNWQYAAVTPEQGWRGAYALPRRLSLKTVNYKPTLVQEPLGAAWLPGPNTSGIDTNYTDLTRDIIPKGTIEPLNVSSQAAEIQLRFSAAATTAVAQEGRFGIIALANRNLTEQTQIGYDFGTKEVFINRIRSGNVTFDATFPEVYHAPLLEADHDGMVSLRIFLDWSSVEVFAGHGETSLTARVFPTEEARGLYVFSEEADTEKVSIRVRTVASVWK

SEQ ID NO: 388 - protein, 702 aa, Unknown
  Description of Unknown: Penicillium sp. sequence
MKSISMLWEVLLLGAFLSQVDAAPTKESYTELYRPQYHFTPAQNWMNDPNGLLYADGTYHMYYQYNPGGNTWGAMSWGHATSEDLTHWKEQPVALLARGYPNNITEMFFSGSAVIDEHNTSGFGKKGKAPWIAMYTSYYPTAQVLPSGKQVRDNQQAQSIAYSLDHGTTWTTYDEANPVILDPPAPYQDQFLDFRDPNIFWHQPIRKWVAVVSLAKLHKLLIYTSTNLKQWDLESEFGPFNAVGGNWECPNIFPLPVDGDKSKVKWVAIVGINPGGPPGTVGSGVQYFLGDFNGTTFTADSNSIHGGGPPDGSFIFEDFEGNHSFSDRGWIATGDFIGTSPVAGTLPGQNPVTGYLGNQLVNTFLNGDATTGTLTSPSFTISYKYINFLIGGGDNINQTAIQLKIDGNVVYAATGSNSEQLTWQHWDVSAFQNQTAVIEIIDLATGGWGHINVDEISFANTPATNNNANWLDWGPDFYATQGYNGLPQYQRTIISWMNNWQYGGVIPTSPWRSAMSIPRQLSLKTIDESIAVVQEPEECWKAITQTQIASTFPSITGTHSLGDIGNAAEIELTFSSGDGTNGSSEFGIIVRASKDFSQQTRIGYDFTTQQVFVDRTKSGDVSFDSTFASVYYAPLSPASDKTVTLRIFVDWSSVEVFGGQGQTTMTTQIFPDENATNAQLFSTGGSTKNVQLRISKVRSTWV

SEQ ID NO: 389 - protein, 703 aa, Unknown
  Description of Unknown: Aspergillus rugulosus sequence
MKLNIFASAILLCTSAFPVAASRLDKPYTEVYRPQYHFSPKENWMNDPNGLVYDTDEGIYHIYFQYNPGGTTWGAMSWGHATSRDLMHWTEHPVALRARGFPDNITEMFFSGTVVVDESNTSGFGRKGKVPWVAIYTSYYPMEQVLPSGKRVRKDQQAQSIAYSLDKGMTWTTYDAANPVIAEPPAPYHDQHLEFRDPSVFWHVETSRWVAVVSLAKLHKILIYTSQDLKQWDWVSEFGPANAVGGVWECPSIFPLTLDGSQQDKWVLMLGLNPGGPPGTIGSGTQYIVGDFNGTTFTADADSIYDGSGPNDGMIFEDFEGDESLAARGWATTGDFINASPVRGTLSGQNAVTGFQGQQLFNTFLNGDATTGAITSAPFDITYKYINFLVGGGNDINETAIRLNVNGKTVHASTGSNDEHLTWQSWDVSSLKGQRAVIEIIDNASDGWGHINVDQICFSNTRATNQIANWLDWGPDFYAALSFNGLDRDQRTILAWMNNWQYGAAIPTDPWRSAMTVPRRLALKTIDGKPSLVQQPAGRWRTSGNHGREFSFRAVDGVRPLGRLGKALDIELTFSSNMSPSNGLGEFGVSIAATKGYQYGTRVGYDFATQQVFVDRSRSGDVSFDATFPGVYHAPLSNSANGTISLRILLDWSSVEVFGAHGEATITSQIFPGPDAVYGQLFSSGGQTRDVSLQVREIQSTWH

SEQ ID NO: 390 - protein, 1217 aa, Unknown
  Description of Unknown: Aspergillus fumigatus sequence
MAISLSPKTDWQGLVAAKRKRLDAQIPSEWRLSDDFRASVPADGHLIEADIARRSGILSDKELDITENFSAVELLKNLAERKFSAVDVTTAFCKRAAIAQQLTSCLTEHFFAKAIERAQFLDEYLQREKKVIGPLHGLPNSIKDSFCLEGIQSTVGYVSLLQNEPVSHNSALVEILFDLGAVLNIPQTMMTGDSENNIFGRTLNPHNTNLTAGGSSGGEGALVAFRGSILAVGTDIAGSIRIPSLCCGVYGFKPTTDRIPWGGQVAGLAMEGIPGLKPSAGPLGHSLADIELFMSTVLKAEPWKYDVTASASPWQELPLTPECSSQVKLTIGILPESKDFPLHPPVRRALESAIKSLCQRGHHIVRLPDDPSRDLAYASRLAFQYFIYGPHTDHITSSGEPLVTSVAKMSSPMFTGPFPLDMELPPFEKISALHTARQEYADAWRRCWVGNGLDVVLAPGAQNTAVPHDTFGWPPYTVIWNLLDYPACIIPYGEACKELDPVPMAIDDGVQPSSMKLSALLQPLVLGMSASAAARPSKPSTYTEPYRPQYHFSPEKNWMNDPNGLVYDAKEGVYHLYFQYNPGGTTWGAMSWGHATSKDLMHWTEHPVALRAKGFPDNITEMFFSGTVVIDERNTSGFGRNGNTPWVAMYTSYYPMEQVLPSGKRVKTNQQAQSIAYSLDRGMTWTTYDAANPVIAEPPTPYEDQYTEFRDPSVFWHDETHQWVAVISLAKLHKILIYTSRDLKHWDLASEFGPANAVGGVWECPSIFPLSLDGSKETKFVLMLGLNPGGPPGTVGSGTQYIVGDFNGTTFTPDANSIYDGSGPEDSVIFEDFEGDKTLAARGWTATGDLTSASPAKGTLPGQNPVTGYLGQQLLNTFLNGDATIGTLTSSPFEISHKYINFLVGGGSNLNETAIRLKANGQTVHTSTGSNSEGLAWQSWDVSALQGKTAVIEIIDNSTGGWGHINVDQISFSNQPATSTIANWMDWGPDFYAALGFNGLPQDKRTIIAWMNNWQYGGVIPTDPWRSAMSVPRQLALKTINGKATIVQEPAGKWSALTHGGQTFSFPRVEGVRGLGRIGKTLELELTFSSRQSPAAGKAEFGVAVAATKDYSHETRVGYNFATQQVFVDRTHSGDTSFDGTFASVYQAPLAPSADGTVSLRVLVDWSSVEVFGGHGEVTITSQIFPASDAVYGRLFSTDGETKNVKLRVKEVRSTWR

SEQ ID NO: 391 - protein, 531 aa, Bacillus sp.
MKKNYRLGAFVTTVTLVAGLFSYPTSSIANDSREVKGLGELPGVQLNTNRHYYNEIYRPQFHFTPEQNWMNDPNGLVYYKGEYHLFYQYNPKGNTWGNMSWGHAVSKDLLHWEHLDVALKPDELGMIFSGSMVVDKHNTSGLFKKGSGGLVAIFTHAGDTQQQSIAYSEDNGRTWKKYKGNPVIKNPGIADFRDPKVFWHEDTKQWVMVVAAGNRIQIYSSSNLKEWEYKSEFGEGMGAHGGVWECPDLFEIPVDGNPNHTKWVLGVDINPGAVAGGSGGQYFIGDFDGKTFKTKQEPKEINWVDYGKDFYASQSWDNMNQRRVWIAWMNNWNYAEKIPTSPWRSAMSIPREVGLKKTDNGEILLTQKPIHEIKKIRDKKFEFKNRKIQSENIKIPKISGQTQEIVAEFELGSADEFGFYVRKGHGEFTKVGYDAKKRELFVDRRKSGRTDFSEDFAGVYTAPLDSEDNKIKMHIFIDRSSVEVFGNDGERVLTNQIFPDPSSDGLEIYSKDGDVKITSLDVYKLGSTWDK

SEQ ID NO: 392 - protein, 531 aa, Bacillus sp.
MRNIYRLGTVITSVTLASSLFSYPTSSAAKDSRQVKGIQELKGLQMNIKNPYYNELYRPQFHFTPDQNWMNDPNGLVYYKGEYHLFYQYNPKGNTWGNMSWGHAVSKDLLHWEHLDVAMKPDELGMIFSGSIVVDKHNTSGLFKKGSGGLVAIFTHAGDTQQQSIAYSEDNGRTWNKYNGNPVIENPGIADFRDPKVFWHDDTNKWVMVIAAGKRIQLYSSQNLKNWEYMSEFGEGMGAQGGVWECPDLFEIPVDGNPNHTKWVLQVDLNPGAVAGGSGGQYFVGAFDGKTFKTEQKAEEINWVDYGKDFYAAQSWDNTQQRRIWMAWMNNWDYAEKIPTSPWRSAMTLPREVGLKTTEKGEILLTQKPIQEMKKIREKKHQLKNRNIQSDNIKFPKIDGQTQEIVAEFELGTADEFGFYARKGDEEFTKIGYDVKREELFVDRTKSGQANFSENFSGIYAAPLKAAGNKVKMHIFVDRSSVEVFGNDGERVLTNQIFPKPTSEGLEVYAKNGEVHLSSLNVYKLDSTWKN

SEQ ID NO: 393 - protein, 524 aa, Bacillus sp.
MRKWLLAVGVIVVIGILIFFAPFNDKNESPEQEEKEPEIPKEYNQSLRPQFHYTPKQNWMNDPNGMVYFEGKYHLFYQHNPTGNEFGNMGWGHAVSEDLYHWEEKPMALEADDQGMIFSGGAVYDKTNTSGLFAEGKAGLVAFYTIAGDEQTQGLAYSEDGGETWKKYRGNPILPNPGVKDFRDPKVVWHEESEKWIMLLAAGNKVIFYGSDNLIDWEKLSEFGVDQGAQGGVWETPELFQLPVDGDSSNEKWVLQVDMNPGSIAGGSGGQYFIGDFDGKAFTREGAKEDINWVDYGTDFYAAQAFSNHEGNPIWLAWMSNWMYASDLPTDPWKGAMSLPREVSLKEVNGETRLIQEPAGEIESNRSKKLVDLSDKEVEGRMPLDFKADTYEVVAEFDLDTSGEFGFRVRKGDEEETIVGYDSKNNLAFVDRQNSGDTSFHEQFPGVYRAPLEPTEDGKVKLHLFVDRSSVELFANDGKRVMTNRIFPSEDSDDFEIYAMNGKVTLESLEVYELDSSWKTGEKE

SEQ ID NO: 394 - protein, 431 aa, Unknown
  Description of Unknown: Penicillium chrysogenum sequence
MNAVHIIKALAVGILAGIANAFNYDQPYRGQYHFSPQENWINDPSGLLYHDGIYHLFFQYNPGGIEWGNLSWGHATSKDLTHWEEQPVALLARGYGGNVTEMYFTGSAVVDMKNTSGFGKNGKTPIVAMYTSFYPVTQTLPSGKAIQENQQAQSIAYSLDDDWNLASEFGPYNAQGGVWECPSIFQLPLDGGKSTKWILTAALNPSGPPGTVGSGNQYFGPDFYAAAGYNGLPIDTHVQIGWMNNWQYGANIPPSTWHGATTIPRHLTLKTIGDKRAAYSHKYNAVQEGSHYVGTTGETMKINLSFSAASKASKFAIAVRGSADFTEQTLVGYDFVKKQVFVDRTKSGDVSFDNTFASVYRGPLAAGVDGMVNLSIFVDRSSVEVFGGQGETTLTAQIFPRRDALNAKLLSTGGATESVKLDIFNVASTWK

SEQ ID NO: 395 - protein, 533 aa, Bacillus sp.
MSKQMRFTLLGGIVLLLIALLIYLIANISSEGNKDLSENQENLENPVGNQEIPAEYDQSFRPQFHYTPAENWMNDPNGMVYYEGEYHLFYQYNPEGDQFGNMSWGHATSKDLVHWKEEEVAMTPDENGMIFSGSIIADENNKSGLFPDGEGGLIAFYTSAGDVQDQRIAYSTDKGRTWTKYEGNPVVPNPDIEDFRDPKVVWHEESEQYIMLLAAGKKVMFYGSKNLVDWEYLSEFGNVGAQDGVWETPELFELPVDGNEEDTRWVLQVDMNPGSIAGGSGGQYFLGNFNGKEFIRQEKTDDINWVDFGKDFYAAQAFNGMDDRTVWMAWMSNWEYAADIPTDPWRGAMSIPREVTLTKDKNDEVQLVQQPAPELEQLRGDLLYETTDETLGGAKPLSDIESQTYEIVAEFEVGSAGEFGFRVRNSDDLKEGTIVGYDAKNDLVFTDRADSGKTDFHENFPGVYRAPSSAEDGTVKLHLFVDRSSVELFANGGRQVMTNRIFPFMESNGLEMYSKDGEVTIKSMQIYEMNTIH

SEQ ID NO: 396 - protein, 712 aa, Unknown
  Description of Unknown: Penicillium sp. sequence
MFYSTIIRKAILFASLGILCVAETYQEQYRDQYHFSPEKNWMNDPNGMLYHKGVYHLYFQYNPGGMTWGNISWGHATSNDLLHWTEQPIALEVRKDAGGNVQEYFYSGSAVVDTENTSGFGTRGHPPLVAIYTSHYAQNMTLPSGKTVVSGQESQSIAYSLDDGMTWTTYDAQNPVIHEPPTEYITADTIQNFRDPFVFWDDSQKHWTMVVSLPNDHMVLIYTSPNLKDWTKVSTFGPANAISGQWECPGLFPLPVDGDKNNVKWVLQLGSNPGGPTIGSGTQYFVGSFDGTTFTADADTVYAAVGGPAGSSVVEDWQDTSSLASSTAALNWTATGDFVGITPVTGEDKVSNVLDTYFHGDSNTGAITSEAFVIAKSFMNFRIAGGYHPYNPSTYGTPSDPETSLNLKVNGKVVRSATGQNTGTLAWQGWDVSNFANQTAVLEIADFNTGATGWGHLIVGEIVFSESLAEEQKANWVDHGPDYYAAATYNGLDGYDRVAVGWANNWAYGSDIPTNPWRSSMSVMRKYSLATIDSKITLVQEPYNLAPISSTCYDKKWDTLPGSKFDLPVTGKSLDVTLAFDIVSTINSSAQEDSTMRLLVRSSKDGSHATVIGYDASTQQFFVDRTNSGDVNFAPVFPGTYSAALIPDAHGRVTLRMLVDWSLVEVFGGQGESVITAQIFPSDDNESISLSYTPGAFKNVYIKVKDVASVWK

SEQ ID NO: 397 - protein, 482 aa, Bacillus sp.
MTQAYKEKYRSQFHFSPKEKWMNDPNGMVYFNEEYHLFYQYHPYGTTWGPMHWGHAVSKDMIHWEHLPIALFPDELGAIFSGSAVVDWNNTTGFFDQGQQGLVAIYTSAGTYPNSDRPLQQQSLAFSKDNGRTWIKYEGNPVLSDIDIIDYRDPKVFWHEETNKWVMVLATGQTITIYTSLNLKEWEFASEFGHAAGSHDGVWECPDLFNLPVEGGENKWVMIVSIGDNGKTKEGSRTQYFIGRFDGTTFVNDHDDSTILWLDYGRDNYAGVSWSDIQDGRRIYLGWMSNWRYANQVPTEAWRSAMTLPRELSLVSTEDGIRLFQKPVAEISTIRKEIKISTEEAGNIPLSSSLMEINIEFEKESSNQFGFVIKHSEEEKTVIGYDVLEEKVFVDRTLSGDSSFSTSFPAIQEAPLKLDQQRLKLQVFLDTSSIEVFAKNGEVAITNLLFPSEGSKELLLFSNEGTTKVLNLTLTELDSIWR

SEQ ID NO: 398 - protein, 614 aa, Unknown
  Description of Unknown: Aspergillus coremiiformis sequence
MPVLAGCEGAAIPASSVTQTQSYHLVENSPSREQQITSARRVLHSRPSFHLTAPHGWLNDPCGLGYDPTTGLYHLSFQWNPKGNDWGNISWGHSVSDDLISWKISPEPCLTPSTEYDGCGIFTGCFRPSNINGATGALTYIYTSVRRLPLHYTLPYAAGSESVSLAVSLDNGTTWQRLDCNPILPAPPPDVTVTAWRDPYIGVWTGKQGHNRLPPSSLCGFLSGGIVGQTPTVFVYSVDPSDLRKWTYVGPLVSIGLNVRPSRWSGDLGINWETANWIVLCDREGTTRNFIIMGVEGCLAAEKEQKRVSRSQLWMAVDPPGQPRCDPTDALADYAFSGIFDHGCAYAANSFWDPVTSQYVVYCWITEEDLPDDIRHYQGWSGVISLPRVVKLTTLRNVKKARRSELSDMTSIEKIANTKGTYTIRTLGIEPDQRLKKLRRTAKSVANVSLGGLQCRGKCLPLTTSRWELQAEFGVGKQCNIVGVEVEHGLNLHTVLAWEPNTETFSIQRPPPYDPNINHTPETAPHTLFTFVDESGAEHEETLRIHAFSDGNVLEVFVNERAVISTRIYVPYDEASVGLRFFAESDPSASHSTHPPAILLRATLWDELEGARVI

SEQ ID NO: 399 - protein, 456 aa, Unknown
  Description of Unknown: Aspergillus oryzae sequence
MPVLAGCEGAAIPANLVSQTQSYNSNLIENSLSCEQQVTSSRHVLYSRPLFHLTAPRGWLNDPCGLGYDPATGLYHLSFQWNPKGNDWGNISWGHSVSQDLISWKTSPEPCLTPSAEYDSCGIFTGCFRPSDINGVAGALTYIYTSVRRLPLHYTLPYEVGSESLSIAVSRDNGVTWQRLDSNPILPAPPPDLNVTAWRDPYIGVWTAKQGEHDNDILPPLSLSGFLSGGIAGRTPTVFVYSVNPDDLREWTYVGPLVNVGLNFRPSRWSGDLGVNWETTNWVVLTDHEGTTKNFIIMGVEGCLVSEREQKRVSRSQLWMAVDPRPEQPKSEPIDALTDYAFSGIFDHGCAYAANSFWDPVTSQYIVYCWIAEEDLPDGIRHRQGWSGVISLPRSLKLTTLRNVTKTRHSNLSDVTSIEKEANGEGSFTIRTLGVEPDQRLKKLRGEAQSITNVAL

SEQ ID NO: 400 - protein, 582 aa, Unknown
  Description of Unknown: Aspergillus leporis sequence
MLVPAGCEGMATPAEPATPAQSYHRKDPVLHEQEFMAPQHVLYSRPLFHLTAPRGWLNDPCGLGYDPASALHHLSFQWNPKGNDWEDISWRHSVSYDLISWKVFPEPCLAFSAEYDQCGKFTGCFRASNLNGEAGALTYLYTSVRRLPLHYTLPYVVGSESLSMTVSNDNGITWQRPDFNSILPSPPPDVNVTGWRDPYIGVWAAKPAEYGRLSSSSLCGFLSGGIAGQTPTVFVYSTNPNDLREWKYAGSLVNIGLNVRPSRWSGDLGVNWETANWVGLTDDEEVTKNFIIMGVEGCLVSESEQKRVSRSQSWMAVDYTFSGIFGHGCAYAANSFWDPVTLQHVVYCWIMEQDLPDGSRHQQGWSGVISVPRVVKLITLRNKKANTKGTFIVRTLGIEPDPRLEKIRKDPQSVANTRLEDRQYCENSLSLTTSRWELKAEFSIGELCKVVGIEVEHDSDPHNRTVLAWEPCNEAFWIQRPSPYDPNINHAPETAPHTLFTFIDKNGREQEETLRIHAFSNRNVLEVFVNERTVISTRVYTPCVESFAGLRFFAELTPTALNSKHTPAVLLQADLLDGLEVA

SEQ ID NO: 401 - protein, 623 aa, Unknown
  Description of Unknown: Aspergillus wentii sequence
MSIIARRKGVEVLPISESSPQVPNHERDQESQPVEHQTAVSREALRWRPSFHLTAPHGWLNDPCGLGYDPATGLYHLAFQWNPIGNDWGNISWGHSVSSDLVLWKTSPHPCLTPSADYDNCGVFTGCLQSSNINGEPGALTYIYTSVGHLPIHYTLPYVAGSESLSLAVSHDGGTTWQRQNCNPILPGSPPGVNVTGWRDPYIGAWPSMQRHPNIPSSNLYGFISGGIVSETPTVFVYTVNPKNLKEWKYIGPLIDVGLNFRPSRWSGDFGVNWEVSTLTTLTDSELASRDFIITGAEGCLEIGNPQKRVPRSQLWMCVKPRSELGKHCGFEPLTTYAFGGIFDHGCFYAANSFWDPVTSQQIVYGWITEEDLPDSLRHRQGWSGLISLPRAIKLMTLHNVKKARRSELKKITSIETEVNSHGTYTVRTLGVQPDQRLGKLRALARKTQLASLQLQSASHHARLENTIPLKTPRWEMNTEFVVNEQCALVGIEIGHNPEFSCRTLLSWNPSGETFTIKRPQVLESGINHSPEVAPHTLFTFDDCGEEKEETLRVQAYFDKSVLEVFVNERTVISTRVYSPEDSCAGLRFFAESNSSHADSQGHNPAAVLVHANVWDGLGNESV

SEQ ID NO: 402 - protein, 577 aa, Unknown
  Description of Unknown: Aspergillus carbonarius sequence
MDRMRPSYHITAPRGWLNDPCGLGYDPATGLYHLSFQWNPKGNDWGNISWGRCVSTNLLTWKISPEPCLEPTTEYDRCGVFTGCLQPTAVNGAPNALTVVYTSVGRLPIHYTLPYVPGSESVSLATSQDRGNTWQRLDCNPVLPRPPATVTVTGWRDPFIGRWQLMLERPGADQSSALCGFLSGGIAGKTPTAFAYAINPHDLRHWTYLGPLVQVGLNFQPSRWSGDLGVNWEVVNWVPMTDDESTTRYFIIMGAEGCVVSGKDGKRIPRAQLWMSVKPCSRAQPHSATDALSTYAYSGIFDHGCCYAANSFWDPITTQHIVYCWITEEDLPDDLRHQQGWSGMLSIPRVATLTTLHCVRRARRSELSAITSIETQRETEHTSTVRTLGIRPDPRLEGLRNEGNRIRVDNVPLAKRGDRTSPSDTYLSLMTSRWEVHVEFSVSNQCSAVGIEIQHDGNAQHRTILSWEPFSEVFTIQRPPPHDSRINHDPESAPHTLFTFETLSGEQREETLRIHAFWDASVLEVFVNERTVISTRIYLLPNQVRCSRLRFFAEGETDSPPAMLLQADGWDGLGVSQ

SEQ ID NO: 403 - protein, 645 aa, Unknown
  Description of Unknown: Aspergillus thermomutatus sequence
MHILPGSQHAEALGDSGTQIRPVHCEPEQIAKTNRQTTGITHVSTKWRPSYHLAAPQGWMNDPCGLGYDPATGVYHLSFQWNPRGNDWGNISWGHATSNDLVSWKISPEPCLTPSAEYDRCGVFTGCFRPHGPDGKPGVLTYIYTSVNHLPLHYTLPYVTGSESLSIAVSHDRGTTWQRFDGNPIIPGAPAGVDVTGWRDPYLNCWPSLRAQQQDGLVSPNLYGFISGGIAKESPTVFVYVVNPDNLTEWTYFGPLLHVGLNFRPSRWSGDLGVNWEVANCLTLTDDGVSRDFVIFGAEGCLSSEDGSKRVPRSLLWMCVNVRPRLQAHSIFEPLAEYAFSGIFDHGCCYAANSFWDPITEQYVVYCWITEEDLPDRLRHRQGWSGVISLPRVVGLVTLDNVKRAHQSKLESITSIETECNSQGTRVRTLSIRPDPRLDKLRTSAQELHLSNVHLGSLAHQPSAFLPLGTARWELNATFVVEKHCAAVGLEIGHSPGELSCFLFPEAAIIADAQGDFHQRTVLSWKPYDETFTIERPPPHDAGVNHAPETAPHTLFTFCNNEGEEMTESLQVHAYFDSSVLEVFVNSRTVISTRIYTPHAQACTGLKFFASATESQLKPSTSAAVLLRADVWDGLSVIRDELSIR

SEQ ID NO: 404 - protein, 617 aa, Unknown
  Description of Unknown: Aspergillus luchuensis sequence
MERQTSLSDDAQRWQPSYHFTAPHGWMNDPCGLGHDPATGLYHLSFQWNPKGNDWGNMSWGHAVSNDLLHWDVYPEPCLQPTTEYDQCGVFTGCFRPNAVDGVPNALTVIFTSVKRLPIHYTLPYVPGSESVSLATSRDHGLTWQRLDCNPVIPRSPPDVKVTGWRDPFVGVWQFMQEQPEAFPSSDLCGLISGGIAGQTPTAFVYSINPHDLRQWKYMGPLVDVGLNFQPSRWSGDLGVNWEVVNWIPMTDDEDVTRLFILMGAEGGLLPDKSRKKTPRAQLWMSIKPCSSTQPRSTTDALASYAFSGVFDHGCAYAANSFWDPVTGQQIVYCWITEDDLPDDLRHQQGWSSMLSIPRVVKLITLRHVKQVRRSELNAITSIEAQEESQETFTIRTLGVVPDPRLKALRSKTSSMHIEHLPLSTLDNCISPPKAHFSLTTSKWEIDTEFSVSDRCGRVGIEIRHGLVHQHKPADAEPPRRTILYWEPASETFCIQRPIPHDSRINHEPETAPHTLFMLETPSGEQKEETLQIHAFWDKSVLEVFVNERTVISTRIYLQPDQASQCELRFFAEGETNHDDPPAMLLQADSWDGLGLDKPDRVSLIEQLRMRNNSTRD

SEQ ID NO: 405 - protein, 607 aa, Unknown
  Description of Unknown: Aspergillus ibericus sequence
MTLTGVRPLYPSSHRSSSSDVRSDVMERKDRHLDDAQRCRPSYHITAPRGWLNDPCGLGYDPTAGLYHLSFQWNPKGNDWGNISWGHGVSKDLLAWEIFPEPCLEPTTAYDHCGIFTGCLRPTAVNGAPHTLTVVYTSVKRLPIHYTLPYVPGSESVSMATSQDQGLTWQRLDCNPVLLRPPETVTVTGWRDPFIGRWQFMLQQPGAFQSSDLCGLISGGIAGKTPTAFVYSINPHDLRQWNYLGLLVHVGLNFQPSRWSGDLGVNWEVVNWVPLTDDEKTTRYFIIMGAEGCLDSRKYVKRTPRAQLWMSIKPCSSAADALATYAFSGIFDHGCCYAANSFWDPITAQQIVYCWITEEDLPDDLRHQQGWSGMLSIPRVAKLITLHRVRRARHSELSAITSIETQRVTQQTSTIRTLGIQPDPRLEGLRNERCKMHVDNLPLENRRDGDSLSSPHLSLITSTWEVLAEFSVSNQCSAVGMEIKHGDDMQHRTILYWEPSRETFIVQRPLPHDSRINHDPESAPHTLFTFKTLSGEEREETLQIHAFWDTSVLEVFVNERTVISTRIYLLPNQARCSRLRFFAEGKSDSPPAVLLQASGWDGLGVSQ

SEQ ID NO: 406 - protein, 627 aa, Unknown
  Description of Unknown: Aspergillus fumigatus sequence
MHILPGSQHAAELDNSGTLIHSVHCDPEQKAKNIPQSTGIAQASSEWRPSYHLAAPRGWMNDPCGLGYDPTTGLYHLSFQWNPHGNDWGNISWGHATSSDLVSWQISPEPCLTPSAEYDRCGVFTGCFRSHGPDGKPGVLTYVYTSVNHLPLHYTLPYVKGSESLSIAVSRDHGKTWQRIDSNPIHPGAPAGLEVTGWRDPYLNCWPSLRAQRQGGVASPDLYGFISGGIAKESPTVFVYVVNPDNLTEWTYIGPLLHVGLNYRPSRWSGDLGVNWEVANFFTLTDGGVSRDIVIFGAEGCLSCEVGSKRVPRSLLWMCINVRPGLQAQSSGEPLADYSFSGIFDHGCCYAANSFWDPVTEEYVVYCWITEEDLPDRLRHRQGWSGIMSLPRLVRLVTLHNVKRAHQSKLESITSVEIERHSQGTQVRTLSVRPDPRLNILRTSARELHLSNVQLGSVAHQPPAFLPLRTARWEMTATFVIGTHCAAVGLEIGHSPDFHQRTTLSWIPYDETFTIERPPLHDAGINHVPETAPHTLFTFCNNEGEEVTEPLQIHAYFDASVLEVFVNSRTVISTRIYTPHAQVCTGLKFFASATESQPKPSTSAPAAVLVRADIWDGLSVIRDEIKH

SEQ ID NO: 407 - protein, 575 aa, Unknown
  Description of Unknown: Aspergillus ruber sequence
MTAYHDKSKHQRKTEPAWRPTFHLTAPHGWLNDPCGPGYDPTTELYHLSFQWNPKENDWGNVSWGHSVSRDLVEWETSPVPCLTPSTQYDRCGVFTGCMRPTDAHGKPGALTYLYTSVRHLPIHYSMPYTIGCETLSMAISRDGGKTWKRPDCNPILPGPPENVNVTGWRDPYISSWPTMHTGSDSDLYGFISGGIAAETPTVFVYSVNPKDLREWKYIGPLINVGLNFRPSRWSGDFGVNWEVATLATLSDDKGTSRDFVVVGTEGCKETGHQPKRAPRGQLWMSVSPRSERKSTSDALRTYGFAGIFDHGCFYAANAFFDPVTGKQLVYGWIMEEDLPDALRHPQGWSGLISLPRVMSLTTLQNVKRARRSELESITSIETEDAGTGTCTIRTLGVQPDQRIEKLRANASRRQISGLKLNPEGFTLPLTTSKWELDAEFAVGNQCTSVGVEIDHDSNCTTLTWTPSTETFQINRPNPIPDFNINNFPEKAPHTLFTTSDPETGTESEEPLRVHAYFDISVLEVFVNERTVISTRIYPLSEHCAGLRFFGDANTTLSRADLWDGLGAMHQSRVS

SEQ ID NO: 408 - protein, 598 aa, Unknown
  Description of Unknown: Aspergillus chevalieri sequence
MAVLTRAQSADKRGIHETHTQPYRHNRTAYQDKSKHQGTTKPAWRPTFHLTAPHGWLNDPCGLGYDPTTGLYHLSFQWNPKENDWGNVSWGHSVSRDLIEWETSLVPCLTPSTEYDRCGVFTGCLWSTDIHGNSGALTYLYTSVGHLPIHYSLPYKTGCETLSMAVSRDGGKTWKRQDCNPILPGPPENVNVTGWRDPYICSWPTMCSGSNSDLYGFISGGIAAETPTVFVYSVNPKDLREWKYIGPLVNVGLNFRPSRWSGDFGVNWEVATLATLSDDEGTSRDFFVMGTEGCKETGHQPKRVPRGQLWMSVNPRHGRRSTSDAFATYGFAGIFDHGCFYAANAFYDPVTGRKIVYGWIMEEDLPDALRHPQGWSGLISLPRVMSLTTLRRVKRARQSELKSITSIEMEEDAETGTYTIRTLGVQSDPRVEKLRANACRRQIGGLELKPEGFTLPLTTSKWELDAEFAVGSQCTSVGVEIDHDDSNYTTLTWAPSTETFQINRPNPIPDSNINYAPEKAPHTLFTTFDPETGTESEEPLRIHAYFDMSVLEIFVNERTVVSTRVYPLNDHCTGVRFFGDANTTLSRADVWDGLGVMH

SEQ ID NO: 409 - protein, 619 aa, Unknown
  Description of Unknown: Aspergillus leporis sequence
MSVLIQSSQATECCVISAPRTFEQKTKIRGSDKKQSIPLISDRAPSFHIKAPHGWLNDPCGLGYNPSTGLYHVAFQWNPKGNDWGNASWGYATSEDFVTWKAAPSPCLAPSTTYDQCGVFTGCLRATDLHGKPGALTSIYTSVSHLPIHYTLPYVKGCETLSVAVSQDGVTWERQSCNPILPGPPSNINVTGWRDPYVGTWSSMQGMAGSASSELYGFLSGGIKDKTPTVFVYTINPTNLHEWSYIGHLVDVGLNIYPSRWSGDFGVNWEVANVMTLSDDQGVSRDFVIMGTEGCVRFDDIARQTSRRVAMDKRTQRQQLWMSVTVHQDNEVRHDTQALARYSFAGIFDHGCFYAANSFFDPTTSQHIVYGWITEEDLPDQLRHAQGWSGLISLPRVISMVTLYNVTKARHSDPKEITSIETEPNTKGSYTIRTLGVQPDQRLKKLRTQACNTELRNVRLYHYTTVPLQTSKWEVRAEFAVNRQCTRVGFAVAHDADLSSQTIISWETPNETFTIERPNAYGPNINHGLETAPHTLFTSSDEHGEEKEETLRIHAIFDMSVLEVFVNERTAISTRVYMPHDRCFGARFFAEANSASTSTINADPAAVLLQANVWDGLAA

SEQ ID NO: 410 - protein, 618 aa, Unknown
  Description of Unknown: Aspergillus burnettii sequence
MSVLTQSSQLAELGVIGAPRTFDHVKARGSDQKQSHPGVSDWTPSFHIKAPQGWLNDPCGLGYDPSTGLYHIAFQWNPKGNDWGNISWGYATSKDFVTWKLSPSPCLVPSTVYDQCGIFTGCLRATDPHGKPGALTHIYTSVSHLPIHYTLPYVKGCESLSIAVSRDGVTWERQNCNPILPGPPSNVDVTGWRDPYVGTWAAMQTKDGVAPSQIYGFLSGGIKNRTPTVFAYAVDPNDLREWKYIGHLADVGLNFYPSRWSGDFGVNWEVASVLTLSDDQGVSRDFAIMGSEGCVHFDDIPRQTGRKMAIDKRTSRQQLWMSLTLRPKMEMQDESEALAKYSFAGVFDHGCFYAANAFFDPNTSLNTVFGWITEEDLPDHLRHVQGWSGMLSTPRVVRMMTLGNVIRARHSDLKAITSIEAELNTKGSYTVRTLGVQPDQRLMKLRNKARNTEIRDLKLYHDATVPLQTSKWEVKAELAVNQQCTRVGFAVAHNADFSSETIISWEVPSETFTVERPTPYDSKINHGLEAAPHTLFTISDEHSNEMEEPLRIHAIFDMSVLEVFVNERTAISTRVYTPVNRCFGVRFLAQADQASGSSFNDDPAAVLLHANVWDGLGA

SEQ ID NO: 411 - protein, 603 aa, Unknown
  Description of Unknown: Aspergillus japonicus sequence
MHCPPSLSDSRSLLHQETFSDQTEQWRPSFHITAPSGWLNDPCGLTYDPTTGLYHLSFQWNPKGNDWGNISWAQCTSSDLLTWKQAQEPCLAPSAEYDRCGVFTGCRRPGTIHGESGALTAIYTSVKCLPIHYARPYVVGSESISLATSTDGGTTWQRLECNPIVPRPPDHLYVTGWRDPFIAQWPLILQQPGALASSDLCGFVSGGIVGETPTVFVYSVNPKDLREWSYVGYVAHIGLHTRPSRWSGDLGVNWEVANFVSLTDDQNRPRNFIIMGAEGVSNRGKPRRRAARAQLWMSIETSPGIRTPEQPLATYAYSGIFDHGCGYAANSFWDPVTSQHVVYCWIAEDSLPDDIRHRQGWSGTLSIPRVVNLVTLHHVKRARGADLTAITSIESEADSRGTCTVRTLGIRPDARVEKLRSNAHRSYLADILLHNPAGQGASPGTRVSLTTSKWELQAEISVRKNCSQVGLFIDHGIDAQRRTTLLWNVDQETFVITRPSPTNPEIDHDPESAPHTLFTYETEQGEIREETLRIHAFWDTSVLEVFINERTVISTRVYLMPADQKRSILQFFAMGRDVQSQSAVEDSPAVLLEANIWDGLAAT

SEQ ID NO: 412 - protein, 615 aa, Unknown
  Description of Unknown: Penicillium camemberti sequence
MSAPVITESDMLVLQNQQNTGQSPCKTHEEKKLPQNPSQWKPSFHVTAPAGWMNDPSGLGYDPETGLYHLSFQWNPHGNDWGNMSWGHATSPDLVSWKTSTDPILTPSAEYDRLGVFTGCLQPTDISGRPGALTIIYTSVSHLPIHYTLPYTFGSETLSLAVSQDGGETWERQNCNPVLTGPPAHLNTTGWRDPWLTTWADGPLSKHTPSTLYGFISGGIANKTPTVFVYTVQATDLTKWDFIGPLMDVGLNLRPSRWSGDYGVNWEVVNLMTLSNDTGTSRDFIIMGAEGCVPLDSSNQDGVQEARQKRVARAQLWMSIKSNGEKKSTSTDSPLASYAFSGIFDHGSYYAANSFYDPQTSQHIVYGWITEEDLSDSLRHRQGFSGLVSLPRVVGLMTLKNVKQARISQLSSITSLEAVPDARGTFTVHTMKISPDSRLTRLRQSARESQLAGVALSTSPSQSDMLLGTSKWEIDAEFSVSKSCARVGIKIPHTSDGQDCTTLSWDPRSETFEIHRPLIDNAEVNHGYETAPHTLFTFVNEHGEEVEETLRIHAYFDASVLEVFVNDRTVISTRIYHPADHCLGPLFFAESDAEANDEQPAAVLGRASIWDGLGV

SEQ ID NO: 413 - protein, 528 aa, Unknown
  Description of Unknown: Aspergillus sclerotiicarbonarius sequence
MERKVLHSDDAQRWRPSYHITAPHGWLNDPCGLGYDPAARLYHLSFQWNPKGNDWGNISWGHCVSNNLLTWEIFPEPCLEPTTEYDHCGVFTGCLRPTAVNGASNSLTVVYTSVERLPIHYTLPYMPGSESVSLATSQDQGLTWQRLDCNPVLPRPPGTVTVTGWRDPFIGSWQLMLEQPGAFQSSDLCGLISGGVAGKTPTAFVYSINPHDLRQWKYLGPLVHVGLNFQPPRWSGDLGVNWEVVNWVPMTDHENVTRYFIIMGAEGCLVSEKYRRRTPRAQLWMSVKPCSQQHGITGALTTYTFSGIFDHGCCYAANSFWDPVTAQQIVYCWITEEDLPDDLRHQQGWSGMLSIPRVAKLTTLHHVRRARRSELSAITSIETQRETQQTSTIRTLGIRPDPRLEGLRNERTRMHIDNRLLGKHCDCTSPSDTHLSLMTSRWEVQAEFSVSNQCSAVGIEIKHGDAHSDMQHRTILYWEPSSETFTIQRPPPHDSRINHDPESAPHTLFTFETLAGEQRDETLQIHAF

SEQ ID NO: 414 - protein, 624 aa, Unknown
  Description of Unknown: Penicillium brasilianum sequence
MSVLLGSPKASGPELRDKHPQIATQDPTVGNASKMATSKPSFHLTAPNGWMNDPCGLGYDPATGLYHIFFQWNPHGNDWGNMSWGHATSTDFVSWKVSPTPALTPSTEYDCCGVFTGCLQATDIQGKPGSLTAMYTSVRHLPLHYTLPYTTGCESISLAISDNGGQTWECLRCNPVLTGPPEHLSVTGWRDPHLTTWPEQQKASSANPNQPLYGIVSGGVVDKAPAIFVYKVNPTDLRQWKYAGLLVDVGLNFHPSRWSGDFGVNWEVGNLAILSNDTGDSRDFAIMGAEGCLRGEDSLWTTPGSAQYKRQARGQLWMCVRPHDPANNSEVLADYAFAGHFDHGCLYAANSFWDPVTAQRIVYGWITEEDLPDGPRHRQGWSGLISIPRVVHLMTLRNVTKARSSQLESITSLEAIPNTSEPRTYTIHTLGIKPDPRLSLLREGAERRLFPSSQLPISLRNVSNETLALTTSRWELEAEFSINESCERVGIQIAHSSDFKQRTTLSYTPSKETFTIHRPTLEDQTINHGYESAPHTLFTYLNEKGAEIEESLHIHAFFDKSVLEVFVNGRTVTSTRIYHPSEKCFGIRFFAEEEASCAHSETGNEAPASLLRAEVWDGLVESQR

SEQ ID NO: 415 - protein, 623 aa, Unknown
  Description of Unknown: Penicillium steckii sequence
MSVALDASDKNSTRLQEQRLHPSIENDNDPNSIPAKPTTGKPFFHLTAPHGWINDPCGLGYDSTTGLYHIFFQWNPWGNDWGNMSWGHATSIDLVSWEISPEPAMTPSAKYDCRGVFTGCLRPSDPLGEPGALTAVYTSVSHLPIHFTLPYTHGCESISLSVSKDGGKMWQRQDCNPIVTGPPSHLSVTGWRDPFLFHWRRGRQDGPKDSDADADSDFYGITAGGIVGQVPTIFVYKVDPKDLRQWNYIGPLVDVGLNYRPSRWSGDFGANWEVSNLLTLSNDLGDSRDFVIMGVEGCLRPENPNENMRRQARSRRDPRGQMWMSVTARKEHDSIHEPLSDYTFSGYFDHGCLYAANSFWDPQTSSRIVYGWITEEDLPDGPRHRQGWSSMISLPRTVGLMTLEKVKRARNSRLEMITSVEAIADSSEQNTFTIHTLGIKPDPRLSQLRAGARKCILPGISLPLALNMSSEAEFSLNTSRWELQTEFAVSKSCKRVGIEIGHTKNFEHRTILAWEPASETFTIHRPPVSNPEINHGHESAPHTLFTFDNEQGEIEETLRVHAFFDRGVLEVFVNERTVISTRIYHPSEQCFGVRFFAEAFDRQSSQSATLLEAHCWDGLIAKS

SEQ ID NO: 416 - protein, 621 aa, Unknown
  Description of Unknown: Penicillium arizonense sequence
MSGTETPDMDAPIQKSRQKPTRSESHDVIGISYHKNAPRIPTQWRPSFHFLAPAGWMNDPCGLGYDPATDLYHLSFQWNPHGNDWGNMSWGHATSPDLVSWTTYKDPILTPTADYDCRGVFTGCLRSTDISGNAGSLTAIYTSVSNLPLHYTLPYVTGSESLSIAISEDGGMTWERQDCNPILTGPPGQFNVTGWRDPCITTWAEGPLSKGSPLTLYGFISGGVVGQTPTAFVYTVDPNDLRKWEFLGPLVDVGLNLRPSRWSGDFGANWEVANMMTLSDGNVYRDFIILGAEGCLPSEDAIKNGVREAGSKREPRGQLWMSVKASEKQNSNSTDEALASYAFSGFFDHGCYYAANSFWDVQASQQIVFGWITEEDLSDSLRHRQGFSGLTSLPRVVELMTLNNVKKARNSSLSSITSIEVIPDAHGTGNFTVHTMKISPDSRLSRLREGAQKSQLVDIPLSTTAKVMTALQSTKWEIKAEFSVGQSCTRVGIKIPHTSDSQDQKCTTLSWTPDSETFTIDRPHLDNTEVNQGFETAPHTLFTFLDEQGQEIEETLRVRAFFDASVLEVFVNDRTVISTRIYYPEDHCFGPIFFAEADTAEKGAQPAAVLMKADVWDGIGV

SEQ ID NO: 417 - protein, 634 aa, Unknown
  Description of Unknown: Penicillium vulpinum sequence
MGDPIITTELDVPILKPLQKSGQSPFQACEVNDISHEEKLPQNPSQWRPSFHITAPAGWINYPCGLGYDPTTGLYHLCFQWNPHGNDWGNISWGHATSPDLVSWTTSTDPILAPSAEYDCRGVFTGCLQATDASGHPGALTILYTSVRHLPIHHTLPYTLGSESLSLAVSQDGGNTWERQDCNPVLTGPPSHLNVTGWRDPFITTWAEGPLSKHAPSTLYGFISGGISKKTPTVFVYTVQATDLGKWDFIGLLVDVGLNLRPSRWSGDYGVNWEVANLITLTNDTGMSRDFIIMGAEGCGPLDSSNQGAVQEARWKREARGQLWMSVKSNGEKKSSSTDGPLASYAFSGIFDHGCYYAANSFYDPQTSQHIVYGWITEEDLSNSLRHSQGFSGLVSLPRMVGLMTLKNVKKARSSQLSSITSIEAVADALGTGTFTVHTMKISPDSRLTRLRQSAQERHLAGVALSASSSQSATLLGTSKWEIDAEFSVSRSCARVGIKILHTSDGRNCTTLSWDPRSETFEIHRPLIGNAEVNHGYETAPHTLFTFLNEGDEEVEETLRVHAFFDSSVLEVFVNDRTVTSTRIYHPADHCFGPLFFAESDAGVNDEQPAAVLVRASIWDGLGVRELVDTPSRL

SEQ ID NO: 418 - protein, 624 aa, Unknown
  Description of Unknown: Penicillium rubens sequence
MSGSVMTAELDTLVLKHLHNSEQSPCKDHKVNGVSHEDELPQNTSQWRSSFHVIAPAGWMNDPSGLGYDPVTGLYHLCFQWNPHGNDWGNMSWGHATSPDLVSWTTCTEPILTPSAEYDRLGVFTGCLRATDVAGQPGALTVIYTSVRHLPIHYTLPYTRGSESLSLAVSQDGGKTWERQASNPFLTGPPSHLNVTGWRDPVITTWAEGPLSKHTPSTLYGILSGGISKKTPTAFVYTVQESDLSKWHFVGPLVDVGLNLRPSRWSGDYGVNWEVVNLMTLTNGIGTSRDFIIMGAEGCVPLDSTAQDGPQQARQRRETRAQLWMCVKPNGENKSTSKDSALASYTFSGIFDHGCYYAANSFYDPQTSQHIVYGWITEEDLSNSLRHRQGFSGLVSLPRVVGLMTLKDVKKARISQLSSITSIDAIPDATGTGTFTIHTMKISPDSRLTRLRQNARESHLDGVVLSTSPSRTATLLGTSKWEIDAEFSVGRSCARVGIKILHTSDGQDCTTLFWDPRSETFEIHRPLIDYAGVNHGYESAPHTLFTSLNERGEEVEETLRVHAFFDSSVLEVFVNDRTVISTRIYHPAGQCFGALFFAESGAGTEDERPAAVLVRASLWDGLGI

SEQ ID NO: 419 - protein, 627 aa, Unknown
  Description of Unknown: Penicillium griseofulvum sequence
MSVNTPRQKLEQLPCEIHEVHHDGISHKAKRLPRDPSQWRPSFHVTAPAGWLNDPCGLGYDPTTGLYHLCFQWNPYENDWGNISWGHSTSPDLVSWNTSAAPILTPYAEYDCRGVFTGCLQATDASGNPGALTILYTSVSHLPIHHTLPYTLGSESLSLAVSQDGGKTWERQDCNPILTIPPSHLTVTAWRDPFITTWAEGPLSKHTPSTLYGFISGGIAKKTPTVFVYTVQSTDLGKWDFIGPLVDVGLNLRPSRWSGDYGVNWEVANLMTLTNDTGTSRDFIIMGAEGCIPLDNLNPNENGAQEARRRREARGQLWMSITSNGKKEHISTDRPLASYAFSGIFDHGCYYAANSFYDPQTSQHIVYGWITEEDLSDCLRHRQGFSGLVSLPRVVGLMTLENVKKARSSQLGSITSIDAVPNTSGTSTFTIHTMKISPDSRLVRLRQHARESHLSRISLSTSPSQNAMPLGTCKWEIDAEFSVSKSCARVGIKILHTSDGQNCTTLSWDPRSETFEIHRPPIDNAEINHGYETAPHTLFTSVNERGEEIEETLRVHAFFDSSVLEVFVNDRTVISTRIYHPAEHCSGLLFFAESDAGLDEQPAAVLVRASIWDGLGVRGLMSAPPRL

SEQ ID NO: 420 - protein, 639 aa, Unknown
  Description of Unknown: Penicillium coprophilum sequence
MSDPVLTAELEIPAHKPQQKLKQTPCEAHEVSNLFHEEKRLPRDPSQWRPSFHVTAPAGWLNDPCGLGYDPTTELYHLCFQWNPHANDWGNISWGHATSPDLVSWTISTAPILTPSSEYDCRGVFTGCLQATGVSGHQGALTILYTSVSHLPIHYTLPYTFGSESLSLAVSQDGGKSWERQDYNPVLTGPPSHLNVTAWRDPFITTWAEGPLSKHTPSTLYGFISGGIAKKTPTVFVYTVQATNLGKWDFIGPLVDVGLNLQPSRWSGDHGVNWEVANLVTLTNDTGSSRDFIIMGAEGCVPLDSSNSNQAGIQEARRKRESRAQLWMSVKSNGERKPTPTDSPLASYAFSGIFDHGCYYAANSFYDPRTSQHIVCGWITEEDLSDSMRHHQGFSGLISLPRTVGLMTLKNVRKARSSELGSITSIDAIPDAPGTGTFTIHTMKISPDSRLTRLRQSARESHVAGVALSSSLSQSTMMLGTSKWEIDAEFSVSASCARVGIKILHTSDGQNCTILSWDPRSETFKIHRPLIDDTKVNHGYESAPHTLFTLLNARDEEVEETLRVHAFFDSSVLEVFINDRTVISTRIYHPANHCFGSLFFAESCAEAEADDEQPTAVLVRASIWDNLGVRGSVNPPPRL

SEQ ID NO: 421 - protein, 599 aa, Unknown
  Description of Unknown: Penicillium roqueforti sequence
MHGLTHEVNGLSHEEKSLRNPSQWRPSFHVMAPAGWMNDPNGLGYDPKTSLYHLCFQWNPHGNDWGNISWGHAISPDLVSWAISTDPILTPATKYDRLGVFTGCLQATDAFGQPGALTAIYTSVSHLPIRYTLPYTLGSESLSLAVSQDGGKTWERQTCNPFLTGPPPHLNVTGWRDPFITTWAEGPLSKHTPSTLYGFVSGGISKKTPTVFVYTVQATDLSKWEFIGPLIDVGLNLHPSRWSGDYGLNWEVANLMTLTNDTTSRDFIIMGAEGCVPFESSNQDAAQEARRRREPRGQFWISVTSNGEKQSTSTDGALASYAFSGIFDHGCYYAANSFYDPQTSQRIVYGWITEEDLSNTLRHRQGFSGLLSLPRVVGLMTTRNVKKARISELSSITSIEAVPDAPGTGTFTIHTMKINPDSRLARLRQSARESHLADVALSTSPSQSAMLLGTSKWEIDAEFSVSRSCARVGIRILHTHDGQDCTTLSWDPRSETFEIHRPLIDDTEVNHGYETAPHTLFTCLNERGDEVEETLRVHAFFDSSVLEVFVNDRTVISTRIYHPEANCFGLLFFAESDAGVDGDQPAVLVRASIWDGLGV

SEQ ID NO: 422 - protein, 650 aa, Unknown
  Description of Unknown: Penicillium oxalicum sequence
MSVLLSAQDPHGPEIREKHASDASQHSVNSQAAAVVASKPSFHLTAPSGWMNDPCGLGYDPITRLYHIFFQWNPHGNDWGNMSWGHATSTDLVSWNVFPEPALTPSAEYDRCGVFTGCLQATDPLGSPGSLTGIYTSVHHLPLHYTLPYIPGCESLSLAVSQDGGLTWKRQKCNPILTGPPAHLSVTGWRDPHLTTWPAVQRTTPERSTPQDQDQFKGIVAGGIVGRTPAIFVYKVKPANLGQWVYTGLLLDLGLNFHPSRWSGDFGVNWEVSNLVTLANEAGDCREFAIMGAEGCLRAERTPWTTPGSAQYKRQARAQLWMCIRQRSEIRSDEVLADYAFSGHFDHGCLYAANSFWDPITSERVVYGWITEEDLPDGPRHRQGWSGVISIPRVVALTTIRGVTKARSSDLKSITSIEIIPEDPSPMDSNMGQERQTYTIHTLGIKPDPRLSSLRKGAERKSSALASRLPVALRNSSRESVELATSRCEVQAEFRVNHSCEQVGIEITHSPDFQSTTTLSWSPSTETFTIHRPALQDQTINHGYESAPHTLFTKKNLHSHDDQVNKPESHEIEEPLQIHLFYDKSVLEVFVNDRTVISTRIYYPPQSQHSSSGECFGVKFFAKSTTEDESLPTTLIKAEVWDGLAESMRF

SEQ ID NO: 423 - protein, 643 aa, Unknown
  Description of Unknown: Aspergillus versicolor sequence
MSVTTQLAPQLAKPSTSTNTNSTTPAFKPSFAISKQQPDLKSPAFTRWRPTYHLIAPHSWLNDPCGPGYDPSTGKYHLAFQWNPKDNDWGDISWGRATSHDLISWEVDADPCLVPHAPYDSKGIFTGCFQPTNINGQADGTLMYIYTSASKLPIHYTLPYTPGCETLSVALSRDAGRTWERHPHNPILDRPPPDIQVTGWRDPYLFSWSSAPAAVRTRAQDAAASEDIMYGFISGGIVGKTPTIFVYAVPRNELGKWTYIGSLLDVGLNMAPSRWTGDFGVNWEVTNLVTLRDDEGVSRDFLIMGVEGCIPESNNSKDRDRKAVARDRRIQRSQLWMCIKNSADRSSSALMQYAYGGIFDSGLFYAANSFWDPVAQQQVLFGWITEEDLPDDIRKEQGWSGLISLPRVMKLQTMHRVKRARITDLKDITSIEVTPDDRGSYTVRTLGVTPDPRGMKLREGAKESKLCDLVLEDKNGEYMNDHLELNTARWEIDAEISVGKTCTRVGLEIHHENYKTVLFWDPESETFQIHRPDIQNTHRGINHDPETSPHTLFTYISSQGTNDEEVEETLRIRALFDASVLEVFVNERTAISTRIYNASETNCPASTRIRFFAESALSEGNDTVAKLLHATAWDGLGVEARQP

SEQ ID NO: 424 - protein, 690 aa, Unknown
  Description of Unknown: Penicillium sp. sequence
MSVLLSTQISLSSEIRDECSPKASTYSMNDRGTRMAASKPSFHLSASNGWMNDPCGLGYDPLTGLYHMFFQWNPSDNDWGNISWGHATSTDLVSWRVSSTPALTPSTEYDRCGVFTGCLQATDPLGNPGALTAIYTSVRHLPLHYTLPYTLGCESLSLAVSKNGGRTWERPDCNPVLDGPPEHLSVTGWRDPHLTTWPAAQQTNPVGQGQDQDKKPVNGIVAGGVVGRTPAIFVYQVNPKDLQQWTYTGLLVDIGLNFHPSRWSGDFGVNWEVSNLVTLTNDAGDYREFAIMGAEGCLRANKTLWTTPGTAQHKRQPRSQLWMCINRRAEIGHDELLANYQFGGHFDHGCLYAANSFWDPVTSRRVVYGWITEEDLPDEARHRQGWSGVISIPRVVELRTIRGVVKARSSELSSISSVELVPDERSSAGPRTYTIHTLGIKPDPRMTLIRKPAAKVSDTLVHRLPTALRNSSSESLALKSSRWEIKAEFKVNASCDRVGIEIAHQSDHILKTTLCWAPSSETFTIHRPTLKDQTINHGHESAPHTLFSFKNNSHNRNRNRNEIDDRSKHNTQDSKTDICTESQAKDEDTAEVEETLQIHAFYDSSVLEVFVNDRTVISTRIYTHHSHPSLSQSEPQPQPQSQTGSQAFSSEQCHGLRFFAESTVEDECPPAVLLKADVWDGLDETIRFLI

SEQ ID NO: 425 - protein, 641 aa, Unknown
  Description of Unknown: Aspergillus sydowii sequence
MSVITQLAPQLAESNTTATTIPATKSNTAISKEQPDTKSSAFTRWRPSYHLLAPHGWLNDPCGPGYDPSTGKYHLAFQWNPKGNDWGNISWGRATSHDLVSWEVDMKPCLVPSTPYDSKGIFTGCFQPTNLNGQEADGTLVYIYTSVSKLPIHYTLPYTRGCETLSIAVSRDAGRNWERYPNNPILDSPPSGIEVTGWRDPYIFSWPSAPEVVRTRAQNAAGSEDVDVMYGFISGGIVGQTPTIFVYAVPRNELSKWTYVGNLLDVGLNLAPSRWTGDFGVNWEVTNLVTLSDDAGVSRDFLIMGVEGCIPASDSKDKKAVARDRRVQRSQLWMCVKQSETSSPALMQYAYGGIFDSGLFYAANSFWDPVSEQQVLFGWITEEDLPDDIRREQGWSGLISLPRVMKLQTIHRVKRARTTALNDITSIEVTPDEQGSYTVRTLGVTLDPRVMKLREGAKESKLCDLVLVNKPGEYIHDHIQLRTTRWEVDAELSVGKTCTRVGLEIDHGPDYKTVLFWDPASETFQIDRPEIQNARHSGINHDPETSPHTLFTYSSGQGLSDAEEVEETLRIRALFDASVLEVFVNERTAISTRIYNVSETDCPAGTTLRFFAVSPVSEGNDATVAKLLHATAWDGLNGNRY

SEQ ID NO: 426 - protein, 577 aa, Unknown
  Description of Unknown: Aspergillus homomorphus sequence
MHLHPSPSLSDTKGSHRDSSTKQEIGSDKTKQWRPSYHITAPHGWLNDPCGLLYDPSTGLYHLSYQWNPKGNDWGNISWAHCVSSDLLTWKQDTEPCLAPSAEYDRCGVFTGCRRNGAIDGEPGTLTTVYTSVKSLPIHYTLPYVFGSESLSLATSKDGGTTWQRIDCNPILPGPPKHLQVTGWRDPFITQWSAILKQPGAIPSSNLCGFISGGIAGETPTVFVYSINPQNLREWIYVGLLVRIEPRSQPSQWSGDMGVNWEVANFVSLTDDTNRTHDFVIMGAEGTSTRGKPRRRAARAQLWMSIDVCSNTKTQDQALATLPDNMRHEQGWSGVLSIPRVVNMITLHCVMRARCSELIDITSIKLEVDPRGTYTVRTLGIRPDPRVEKLRSKAHRSFLADISLQGAGDHPTPPDTGLFTKTSKWELKAEILVSNCCTEVGLFIDHGLDAQHRTTLSWQVAIEKFIILRPSSIEPEIDHDPESAAHTLFTFETERGEQKQETLRIHAFWDASVLEVFINERTVISTRIYLSPDKQNQSRLHFFARGGDGEPDPSMEASPALLLQADIWDELDTAGLL

SEQ ID NO: 427 - protein, 646 aa, Unknown
  Description of Unknown: Aspergillus nidulans sequence
MPGAMSTPSKPTAPAFTRWRPKFHLLAPSNWLNDPCGPGYDPCTGRYHLAYQWNPKDNEWGDICWGRATSCDLVSWEIDPEPCLAPSAPYDSKGIFTGCFQSTNLQGQQDGTLTYFYTSVKSLPIHYTLPYSNGCETLSIALSRDAGRTWERHAQNPILPGPPAGLQVYGWRDPFVCSWPSAPESVREAARQVVGEGDVMYGFISGGLVNKTPTVFVYAITRNTLTEWKYVGILLDVGLNYTLSRWSGDLGVNWEVSNLVTLTNKEGTSRDFLIMGVEGCIPSPDPNRPAARDRRIQRSQLWTCIKQNETRGQTQTALMQTSFGGIFDSGLFYAANSFFDPVTQRQVVFGWITEEDLPDTTRKEQGWSGLVSLPRTLTLQTIHCVKRARSTTSLGDITSVEAVPDEQGTYTVHTLGVELDPRVEELRKGARVLTREALDLSFNVDEAGTVMAATTSTQSSGCFVPLDTTRWEVDAEIAVGRKCSRVGMVIFHDEDYTAKTTLFWDPVHETFQVERPRPSNINPDINHAPEVTPHTLFTYTNPATTTNDNTASEIETEEPLRIHALFDSSVLEVFVNGRTAITTRIYHSGGRTKTDGPKCVGVQFFADAENAGCDADAHAHSGGGAGGKEAPARLIHATIWDSLACL

SEQ ID NO: 428 - protein, 533 aa, Unknown
  Description of Unknown: Penicillium digitatum sequence
MSWGHATSPDLVSWKTSIDPILTPSAEYDRLGVFTGCLQPTDISGQPGALTIIYTSVRHLPIHYTLPYTLGSETLSLAVSQDGGETWERQNCNPVLTGPPSHLDVTGWRDPWITTWADGPLSTHTPSTLYGFISGGICKKTPTVFVYTVQATDLTKWDFIGPLIDVGLNLRPSRWSGDYGVNWEVVNLMTLTNDTGTSRDFIIMGAEGCVPLDASNQDGAQEARRRRAARSQLWMSIKSNGVKKATVKDSPLASYAFSGIFDHGCYYAANSFYDPQTSQHIVYGWITEEDLSDSLRHRQGFSGLVSLPRVVGLMTLKNVKKARTCRLSSITSIDAVPDAPGTGTSTIYTMKISPDSRLQQLRRNARESQLADIALSTSPSQTATLWGTSKWEIDAEFSVGQSCARVGIKIPHTSDGQNCTTLSWHPRSETFEVHRPMIGNIDVNHGYETAPHTLFTSLNQRGEEVEETLRVHAYFDSSVLEVFVNDRTVITTRIYYPEDHCFEPLFFAEPEAEDYEQPAAVLVQASIWDGLGV

SEQ ID NO: 429 - protein, 642 aa, Unknown
  Description of Unknown: Aspergillus calidoustus sequence
MSAPETERNASNTPEFTRWRPSFHLIAPHNWLNDPCGPGYDPSTNKYHVAYQWNPTGNDWGDISWGRAASSDLVSWEVDAEPCLAPAAPYDDKGIFTGCFQPMNLRGEKDGTLLYFYTSVNKLPIHYTLPYTPGCETLSIALSNDQGRTWERYAQNPILNGPPLTTATAWRDPYVFEWPSAPERVRRLLGEGHENDDVLYALICGGIRDMTPTTFLYAIQRNALDKWVYLGDLVDLVLNFVPSRWSGDFGVNWEVTNLVTLTDDDGVSRDFLIMGTEGCTPPSSFPSSPASSQRAYDNQAPARDRRIQRSQLWMCINENTRSSSSSPMQYAYGGIFDNGLFYAANSFWDPVAEQQVVFGWITEEDLPDEVRGEQGWSGLISLPRVPKLQTIKRVKRARMTANLSDITSIEAVADGSGTHTVRTLGVALDKRVEKLRTGARETRIGDVVLGPEAKHSDEAFMPLDTTKWEVDAEIAVGKDCKRVGVIIYHAENRNQKTVVFWDPVCETFQVDRPDLSNTALGSRNINHAPEITPHTLFTTVSAASQPEKPTTLAKLFSLFSKASERETEEPLHIRALFDTSVLEIFVNERSALTTRIYQAADEDGGTPACVGLQFFADEVDSTSDTASSRLLRATVWDGLACP

SEQ ID NO: 430 - protein, 508 aa, Unknown
  Description of Unknown: Penicillium subrubescens sequence
MSVLLSSPDPSGHKLREKHAPTASQEPDRKKTSNLATSKPSFHLTAPSGWMNDPCGLGYDPTTGLYHLFFQWNPHGNDWGNMSWGHATSTNLVSWKVSPTPALTPSTEYDRCGIFTGCLQATDIYGNPGSLTAMYTSVRHLPLHHTLPYITGCESLSLAVSNNGGKTWDRLECNPILAGPPEHLPVTGWRDPHLTTWPEEQTTSSGSPQHPLHGIVAGGITGKAPAIFVYTVNPTDLRSWTYTGILVDVGLNFHPSRWSGDFGVNWEVGNLMTLSNNGVSRDFAIMGAEGCLRFEDSLWETPGTAQQHRQARSQLWMCIKPRTLNTVTNLHKNENEALAGYVFGGYFDHGCLYAANSFWDPLTSQRIVYGWITEEDLPDEHRHRQGWSGMISLPRVVDLVTLKNVTKARNSKLESITSIEAIPNNHPSELQTYTIHTLGIKPDPRLCLLRDGAERRYFPDEHLPVSLRDTSDESLSLTSNWWELEAEFSVGSSCGRVGIQIAHTTGKS

SEQ ID NO: 431 - protein, 630 aa, Unknown
  Description of Unknown: Penicillium steckii sequence
MTSASSSEGSSFGPLSCGSTRITTPEDSNSVSTSLIRRSTRWRPSFHLMPRAGWMNDPCAPGYDTSTGLYHVSFQWNPNGPDWGDIAWGTATSEDMISWKIKDNPILSPDKTYDAKGVFTGCFVRGQDHSLSYIYTSVSSLPIHHTIPHRRGCETLSIATSSDEGKSWEKSEQSPIIPGEPLGLDVTGWRDPFCAPWPNMCKVLGLESNETLFGIISGGIRDITPTSFLYKVDPNDLSDWRYIGPLTNFGLNFRPSRWSGDLGKNWEVTNFVTLSGEEDTKSGYDFLIMGTEGCLQNITSESFEQHQSNAGPSRPSRGQLWMSGDLQKAESTGSPKMSYEFGGHLDHGCLYAANSFFDPRIQKQVVWGWITEEDLCEDLRHQQGWSGMLSMPRELHLQTIHNVASALVSDLAAITSVKLKSKGDGTFTLQTLASEPYKPLVRHLRGYSSVSSSQLKCSPLGRSSVDVGFSRESLLSQQWELECSFSISKNCSQVGLSIGHSEDFANSTTMTFMPHEETFMVSRPSFPRPDSSLLINSSPEIAPHTLFTMRSADGVETTENLKIRAWRDNSVLEVFVNGRTAISTRIYAGEETFGMRFFAKDELSEEKRLRASHNGPTELVSGNLWDGILI

SEQ ID NO: 432 - protein, 627 aa, Unknown
  Description of Unknown: Penicillium brasilianum sequence
MSITSSSGETSDSPASYGSTGVTTPEGFKAETTSPSQASTRWRPSFHIMPPSGWINDPCAPGYDATTGKYYVSFQWNPNGPDWGDIAWGTATSHDLISWEIEDQPALSPDEVYDSKGVFTGCFFKAQDGTLNYIYTSVSALPIHYTIPHQRGSETLSIATSSDQGRTWHKSHKNPILPGEPSGLDVTGWRDPFCAPWPNMSKTLGLDPKESMFGIISGGIRDKTPTSFLYKIDPKDLSNWMYLGPLANFGLNYSPSRWSGDLGRNWEVTNFFSLNDENDSNSIYDFLIMGTEGCHEDGLEESMNSIGPSRECRGQLWMSGSLQKNESTGSASISYDFGGHLDHGCLYAANSFFDPRSQKHIVWGWVTEEDLCDDLRHQQGWSGMLSMPRELTLQTLHNVVSSLVSDLPSITSVRVESEGDGTSTIRTLTCQPYNPLIQHLRSSPGARFSPLGRSPLGTKGVESELLPEKLWSNHWELECSFNISKTCSQVGVSIGHSRGHENATVMIFEPQNETFKILRPSFSRPDSSLLVQSSPEVAPHTLFTMINQRSGEEYTETLDIRAWRDNSVLEVFVNGRTVISTRLYAAEKTFGIRFFAEDEALDVESFRASHKGSTELQFANLWDGIAI

SEQ ID NO: 433 - protein, 633 aa, Unknown
  Description of Unknown: Aspergillus bertholletiae sequence
MMSISSFGQSSDSSPSRGSTGVTTPEDFKAETTSLAQRYRWRPSFHLMPQTGWMNDPCAPGYDPSTGLYYVSFQWNPNGPDWGDIAWGTATSHDLISWKVDDHPVLSPENRYDSKGVFTGCFFRVQDGTLNYIYTSVSALPIHHTIPHQRGCETLSIATSSDKGRTWYKSEKNPILPGEPSDLDVTGWRDPFCAPWPNMSKTLGLDPKKTLFGIISGGIRDITPTSFLYKIDAKNLSDWKYIGPLANFGLNLRPSRWSGDLGKNWEVTNFLSLHDDNDPRSSSDLLIMGTEGCLEDQPEESLGVAGPSRPRRGQLWMSGSLRKDDATGSASISYNFGGHLDHGCLYAANSFFDQRAQKHIIWGWITEEDLCDDLRHQQGWSGMLSMPRQLYLQTLHDVVGSLVSDLSSITSVKLQSKGDGTFAIQTLASQPYQPLIQHLRSCPDAQLSHLGRSPLSRSGIDVEISRERLLSRHWELECSFNISKTCSKVGVLIGHSRCYEKTTLMTFEPQIETFKISRPSFSRPDSRLLINNSPEAAPHTLFTIINRSSGEECTETLDIRAWRDNSVLEVFVNGRTAISTRLYAAEETFGMRFFAEDEASSTGVLRTSHTGSTDLQFANLWDGIATWTLNSLT

SEQ ID NO: 434 - protein, 499 aa, Unknown
  Description of Unknown: Aspergillus mulundensis sequence
MSTPQSKPPASAFTRWRPQFHLLAPTNWLNDPCGPGYDSSTGKYHIAYQWNPKANDWGDICWGHATSRDLVSWDIDQEPCLSPSAPYDNNGIFTGCFQPTNLEGQQDGTLTYFYTSVNSLPIHYTLPYNFGCETLSIALSRDAGRTWERHPQNPILSRPPLGLQVYGWRDPYICHWLSAPENVRRAAREVAGDDVIYGFISGGLANHTPTVFVYAINRRALYQWNYIGTLLDVGLNATPSRWSGDLGLNWEVANLVTLTNNEGTSRDFLIMGVEGCIPDPKPNYPTAKDNRIQRSQLWTCIKPNGSQTSPAKALMQPSFSGIFDAGLFYAANSFFDPVSQRQVVFGWITEEDLPDDARNEQGWSGLVSLPRMLSLQTIHRVKRARATAQLHDITSIEAIPDGKGSYTVYTLGVEVDGRAQKLRGGARVATLGGLDLTLGEDEVVGKGSGSFVPLITTRWEVDASIAVGKRCGQVGMVILHDESQCLIIGPLHSLSILSD

SEQ ID NO: 435 - protein, 636 aa, Unknown
  Description of Unknown: Aspergillus pseudotamarii sequence
MSSSIAFEHKQHKLRMSTSAREEILHSSASSGSTGLTTPESLTADLPTSTRWRPAFHLMPQEGWINDPCAPGYDPSTGMYYLSFQWNPNGPDWGDIAWGTATSHDLVSWKVIKQPVLLPENDYDSKGVFTGCFVKGQDESLNYIYTSVSALPIHYTLDHPRGCETLSVATSSDMGKTWRKSDLNPILGGEPEGLDVTGWRDPFCGPWPNMSKTLGLDPKETMFGIISGGIRNITPTSFLYRVNPNDFTDWKYIGPIANPGLNFRPSRWSGDLGKNWEVTNFLSLRDGNDPHSISDFLIMGTEGCLEDISKWPPSTASPSRPRRNQLWMSGDLGKDESNGSASMSFNFGGHLDHGCLYAANSFFDPRSQSHIFWGWITEDDLCDDLRHQQGWSGVLSMPRQLYLQTLRNVVGSLVSDLPCITSIKTHSVNGGASTIQTLASGPYQPLVQHLRSAPSVQLSQLGRLCLGASASGVELLPEKGLSKQWELECSFKISQKCSNVGVSINHSRDSERATIMLFEPQLETFTVLRPSFSGRDASLINSSPEVAPHTLFTVSDPSSGEECTETLDIHAWRDNSVLEIFVNGRTAISTRLYAAEETIGVRFFAHDRASTTHGLRTSHTGSTELQFAKVWDGIAS

SEQ ID NO: 436 - protein, 415 aa, Unknown
  Description of Unknown: Aspergillus hancockii sequence
MARRTESSPELYGFLSGGITDKTPTVFVYTVNPNDLREWKYIGHLADVGLNLYPSRWSGDFGVNWEVVNVVSLSDGQGISRDFAIMGTEGCVRFDDIARQTSRKLAIDKRTQRQQLWMSLTLHPEDNARHESEALARYSFAGVFDHGCFYAANSFFDPITSQHIVFGWITEEDLPDQLRLAQGWSGMISLPRMINMVTLHNVARARSSHLKDITCIETEQNTEGSYTIRTLGVQPDQRLGKLRTKACNTELRNLKLYHETTVPLQTSKWEVKAEFTVNNQCTRVGIAIAHDADLSSETIISWEVPSETFTVERPRPYEPTINHGLETAPHTLFTFTGEHGEENEETLRIHAIFDKSVLEVFVNERTAISTRVYTLHKRCFGVRFFAEADPALLGTSNDDPAAVLLQANVWDGLGV

SEQ ID NO: 437 - protein, 580 aa, Unknown
  Description of Unknown: Penicillium rubens sequence
MESHRTRPSLHFTANCWINDPCAPGYDAATGLYHVFYQCNPHGTEWGSMSWGHLISEDLIHWTPFTKPALIPDQPYDRDGVFTGCMAPPENSETGSLKVIYSSVRHLPFHWSTPPYPRDAAGLAIAESRDNGKTWTKLSENPILAGEPQGTQVTGFRDPFLAEWHALNDLRGQNSMYGLVSGGIEGHGPTAFLYSVPHRNVSEWHYLSPLVNIPARFQPSQKWSGNFGINWECVNFLTLEAGSNSRVCLILGAEGDIEREHIRNHKGDAHIPPRTVRSLLWMFGDLRVENNVPRFEYTHGGYLDCGSLYAANSFLDPVSKRHIMHAWIPEEDIPASYAKDKGWNGALAIPRELFLVSISNVTRALYSPLSEISSVEQVPNQDGSATIYTLGIRPVEEIVRLRKRHRHSCQQKYISLPPTAGASHALCSTSSTTWVLEAEIAINPSCCFEVGFHIRHNSDMSIRTMIMFSPQEETISVNKSRSTSDPNIRNCPEQGPFTLFYKTDCLGVQPKDKLETLRIHIISDADTLEVFANDRFALATMVYSPDIRPAGISVVAKGEQGSAVIEEVNIWEGLPSARKV

SEQ ID NO: 438 - protein, 584 aa, Unknown
  Description of Unknown: Aspergillus terreus sequence
MGSNQSPGHSHCWRPRLHPLPAKGWINDPCAVGYNPMTKTYHLGFQWNPDDCQWGSICWGSACSTDLLHWKFMAQPTLRPCASDSPQGVFTGCMVPYDRDGKQNGVITAFYTAVYHLPIHWTRQYVRGSERLHMAVSQDSGQSWKALEKSNPVLEGPPGSLEVTGWRDPFVAPWLHASQRIDCSDTCLWGIVSGGIRNVTPTVFLYRVNLPHLHEWEYIGPLMELGLNFTSSRWSHDFGTNWEVVNFITLSEESGASSYDFLILSAEGRIPRPGSTRSPSRDERAQMFLCGDLDKTEDGALRMKFKYGGVLDYGAFYAGNSFWDPVTNAHILWGWVQEDDLPLEIRRCQGWAGALSFPRVIRLVTLDSVESALVSSIPSITSIGHKADERDPTLYTIQYLAALPDPRIESLRQDKVKSPLNTRLEEDNTPILLHSGTAWNLEASFGIDLSVKNVGLRIVHPKEQTKVYFTPKTETLHVDRSHSTSIPGLCLANEAAPHTLFRRRSKDDENDVFELEPLTLSMFFDGSILEIFANDRTAITTRVYLSDNSLSEIQPWIEYEPGKNGSATDCKLLSFQLWKLDSRS

SEQ ID NO: 439 - protein, 587 aa, Unknown
  Description of Unknown: Penicillium rolfsii sequence
MASDYTRPSLHFTADFWINDPCAPGYDPATGLYHVFYQCNPHSTEWGSMSWGHLISKDLVSWTPSTTPALIPDQPYDSGGVFTGCMIPPTNSKDSLKVIYSSVSRLPFHWSTPPYPRNAAGLAIAESHDNGATWTKYSGNPILMGEPREVQVTGFRDPYISEWHALDQLRGQKSLYGLVSGGIDGRGPTAFLYSVPQENVSNWHYLCPLVDMCARFQPSQKWSGNFGVNWECANFLTLRSDSTSRVCLILGAEGDVEREHIQRFKNHPHVPPRTVRSLLWMFGDLRAVRDSARVDFTYGGYLDCGSLYAANSFFDVLSGRHIMHAWIPEEDITACYAKSKGWNGALAIARELFLLAIPSVTRALHSPLSEIASVEKVPDGEGSVTIYTLGVRPVKEITQLRGHCNNVCERRHISLPSSAGQATETLCSTLLTTWELEAIITIDPSCCLEVGFSISHNGNPSIRTAITFSLQEETISVNKKSPAMNHNIRNCPEQGPFTLFHRTNYQAVEPKDKLEDLRIRIIADADVLEIFANDRFALATMVYSSGGIGPAAVSAFAEGRPGSALIKDVTIWNGLSSTRKEDVNKHV

SEQ ID NO: 440 - protein, 586 aa, Unknown
  Description of Unknown: Penicillium nordicum sequence
MTSNRKPSLHFTAGCWINDPCAPSYDPATASYHVFYQCNPHGTEWGSMSWGHLTSKDLVSWTPSTKPALIPDQPYDRAGVFTGCMAPPANFEQGSLKVIYSSVRHLPFHWSTPPYPRDAAGLAIAESRDNGETWMKCSENPILTGEPKGLQVTGFRDPFLAEWHALNHLRGQKSMYALVSGGIEAYGPTAFLYSVPYENLSEWQYLCPLVNIPARFQPSPKWSGNFGVNWECANFLTLESQTTSRVCLILGAEGDVEREHIRNFEYSEHIPPRTVRSLLWMFGDLRVENNSVSVDYTHGGYLDCGSLYAANSFFDPVSKRHIMHAWIPEEDIAASYAKRKGWNGALAIPRELFLLSIPNVTRALHSPLSEISSVEQVPNREASLTLYTLGIRPVEEIGRLRNRCGRVCQRKQISLPSPTAGASHALCSALFATWELEAEITIDPSCCFEVGFHIGHNSDMSICTTITFSLQEEIISVSKGRSTSDPNVRNCPEQGPFTLFYMLDNMGVEPKDKLDNLRIRIISDADVLEVFANDRFALATMVYSPEDCRSTRISAFAKGEMESAVIEEINIWDVLEIVYWLKVLSL

SEQ ID NO: 441 - protein, 581 aa, Unknown
  Description of Unknown: Penicillium arizonense sequence
MGPTRIRPSLHFTADYWINDPCAPGYDSATGLYHVFYQCNPHGTEWGSMSWGHITSEDLISWTPSMRPALVPDQPYDHDGVFTGCMAPPTNSEQGPLRVVYSSVQDLPFHWSTPPYPRNAAGLAIAKSNDGGKTWTKCSENPILMGEPKGLQVTGFRDPFLAEWHALHQLRGQKSLYGLVSGGIAGHGPTAFLYSVPHNNISEWQYLSPLVNMPARFQPSPKWSGNFGVNWECVNFLTLESESNSRVCLILGAEGDVEREHIRNFESSPQIAPRTVRCLLWMFGDLRFENNSARLDYTHGGYLDCGSLYAANSYFESGSQRHIMHAWIPEEDITASYAKEKGWNGALAIPRELFLLSVPNVTRALHGPLSEVASVERVTNGDGSTTIQTLGIRPVKEIYQLRKRCGHVYQWQNISLPSSTAEATQTLCSATFSTWELEATISIDPSRCHELGFHIRHNSNMSSCTTITFSLQEETISVSKGRSTSDPNIRNCPEKGPFTLFYRASHLAVGSEDKLENLRIRVISDADVLEVFANDWFALTTMVYSPEYSSPTGISVFANGGQESAVFEEVNVWDGLSTAGR

SEQ ID NO: 442 - protein, 1052 aa, Unknown
  Description of Unknown: Aspergillus terreus sequence
MGSNQSPSHSHCWRPRLHPLPAKGWINDPCAVGYNPMTKTYHLGFQWNPDDCEWGSICWGSACSTDLLHWKFMAQPTLRPCAFDSPQGVFTGCMVPYDRDGKQNGAITAFYTAVYHLPIHWTRQYVRGSERLHMAVSQDSGQSWKALEELNPVLEGPPGSLEVTGWRDPFVAPWLHASQRIDCSDNCLWGIVSGGIRDVTPTVFLYRVNLPHLHEWEYIGPLMELGLNFTPSRWSHDFGTNWEVVNFITLSEESGASSYDFLILSAEGRIPRPGSTRSPSRDERAQMFLCGDLDKTEDGALRMKFKYGGVLDYGAFYAGNSFWDPVTNAHILWGWVQEDDLPLEIRRCQGWAGALSFPRVIRLVTLDSVESALVSSIPSITSIGHKADERDPTLYTIQYLAGLPDPRIESLRQDKVKSPLDTRLEENNTPILLHSGTAWNLEASFGIDLSVKNVGLRIVHPKEQTKVYFTPKTETLHVDRSHSTSIPGLCLANEAAPHTLFRRRSKDDENDMFELEALTLSMFFDGSILEIFANGRTAITTRVYLSDNSLSEIQPWIDRTLVGSVALGNLSAIVGHRAETTQKGRKAGRHDVGRTITSPSRADPMDNSVIWDSLVDGLVTQDATDPFTIENCSPDFNFDAVLTPPSAPGWEFGGPEVALRETEIHPLELPFSEAEINRTISRYLYQIHPSMPFFSASFLLDGLKLYRHQNDPAFAAMVIAICAFTHAHSQDADMGPSATGSIALSLRLHQDTDLGESPTVEDLLTSMFVSGVLWRTGKEAAAWLRLQEAINLARLLHLPDLEHDNTLDVKTWDNRARIYLGLGVIDSRTSREQIQQLLRDTATIDSEVWRNLKDRSPVPATSTFRAALETVGLSIDVSLSENEHADVLLTCYWVQMRLWNIALTHGYLSPMSSTVEAATPELSFQYAVDLATRTTDLFKRFSIRSWESHGEGVAEKCFGIASGFLVAATQICMQDITWSPSPPQDPGYGSSPQSDYASNDRIWPSPRCRLDTQYLFQIANGFLGFFCLFQGGRHPYYKEFTGLLDGFRKMCD

SEQ ID NO: 443 - protein, 580 aa, Unknown
  Description of Unknown: Aspergillus nanangensis sequence
MDPGYTRPSLHFTTGSWINDPCAPGYDPATGLYHLFYQCNPHGTEWGSMSWGHITSKDLIFWTSSTEPALIPGETYDRDGVFTGCMVPPNLKQTSLKVIYSSVRQLPFHWSTPPYPRNAAGLAMAESTDGGKTWTKYLENPILMGEPTDVRVTGFRDPFLAEWPAMRRLHGQECLYGLVAGGIEGHGPTAFLYSVPHDTPSEWQYLCPLVDMPARFQPSQKWSGNFGINWECVNFLTLNSKTDTRMCLIIGAEGDIERDHIKNCELGPHTPPRTIRSLLWMFGNLRMKGDSLRFDYTHGGYLDCGSLYAANSFVDCATQRNIMHAWIPEEDITASYAKAKGWNGALAIPREVFLLSIPNVARALRRPLAEIESIESLLNRDGSSTIHTLGVRPVRELDRQRTSSNSVCQERNLSVPASTVGENLTLCWTSFPSWELEATIVLDGTRCREFGFHIRHDSDMSICTTITFSLQQEQLSINKEKSTYNEDVRNCPEAGPFTLFYLSDTTGAESREVLEKLRIRIISDADVLEVFANDRFALATTVYSPGYSRPTGISAFAVAEEGCASIERVDVWDGLVVSQE

SEQ ID NO: 444 - protein, 589 aa, Unknown
  Description of Unknown: Penicillium brasilianum sequence
MTLILDAARMASNRTRPSLHFTAGFWINDPCAPGYDPATGLYHVFYQCNPHSTEWGSMSWGHLTSKNLISWTPSESPALVPDQPYDRDGVFTGCMVQPTNSQDSLKVIYSSVRRLPFHWSTPPYPRNAAGLAIAESNDNGETWTKLSENPFLMGEPKGLQVTGFRDPFLSEWPALDQLRGQKSLYGLVSGGIDGYGPTAFLYSVPHENVSEWHYLCPLVDMSARFQPSQKWTGNFGVNWECANFLTLRSESTSRVCLILGAEGDVEREHIRNFKHHPHVPPRTVRSLLWMFGDLRAGRDTTRVDFTHGGYLDCGSLYAANSFFDALSQRHIMHAWIPEEDITAEYAKHKGWNGALAIARELFLLSIPSVTRALHSPLSEMASVEKVRDKDGSVTIRTLGIRPVEEITQLRRHCDNVCKRYRISLPSSTARETQALCSALFTTWELEASIEIDPSRCIEVGFSISHNGDPSICTTITFLLQEETIRVNKGRSASDPNIRNCPEQGPFTLFYRTNDQAAEPRDKLEDLHIRIIADADVMEIFANDRFALTTMVYSPSCISPAIVSAFAEGGPGSAFIKDVTVWEGLSSTRK

SEQ ID NO: 445 - protein, 589 aa, Unknown
  Description of Unknown: Penicillium sp. sequence
MTIDCGSRTIVRPTIHITAPCWINDPCAPGYDPKSKLYHVFYQCNPRGTEWGNISWGHITSPDLLKWNRSTYQPALEPDQEYDKEGVFTGCFLPSEGTIKRHLTVFYSSVCRLPFHWSTPPYPRGAAGLAMAISSDDGRTWSKPSENPILKGEPDGVQVTGFRDPYVSIWPAMDELQGRNSLYAIISGGVLGAGPTVFLYAVCSDNLAHWEYLGPLVNLPERFQPSKDWSGNYGINWECVNFMTLETESTARQCLILGAEGDVERDHIKRHAQILGGPLRTVRSLLWMFGDLILRHNGVEFCYKLGGYLDHGSLYAANSFLDPTSGRRIMHGWIPEEDVTGDYVREKGWNGALCIPRELFLLCLHNVTAALCAELSEISSVEVMRYPDGSTSLYTLGIRPIFEFMRLRDDCIQTYQRGSFCLPRSTLRHDEICTIQTPCWELEATISVDRNCDAVGFCIESETDSLVRLSIIFSIAEGAIIVDRSASTVNPKISTFPEKGQFTLFYTQPHGMVDKSELEKLHLRAIFDADIVEVYANDRFALATTVYSGYYRSGRKVSAVATGCEHSALFEQVRVWDGLHRCKDLLTVD

SEQ ID NO: 446 - protein, 601 aa, Unknown
  Description of Unknown: Aspergillus niger sequence
MPNRGSRPGHPTVHITAPHWINDPCAPGYDPRTGLYHLFYQCNPWGCEWGNMSWGHATSEDLLHWTVPSNQPVLEPDHDYDRDGVFTGCFLPVISHPDNEQLTVFYSSVRQLPFHWSTPPYPRNAAGLSMANSIDGGKTWNKSNRNPIVQGEPESIRVTGFRDPYIAPWPEMDKLRGQRSLYGIISGGIQDAGPTAFLYAVQWHEPFDWQYLGQLVDFPLRFQPSKKWCGNYGINWECANFMNLESESASATRTCLILGAEGDVERAHIENHQRPVTVPARTVRSLLWMFGDLAGSNHQTDNLKCRFKHGGYLDHGSLYAASTFNDPISGRRILYGWIPEEDITGGHAREKGWNGSLCLPRQLFLLSLRNVTRAVRSKLGEIPSIEMVIEADGSTTLYSLGIRPVSEITQLRTKCIQAHEARPFSLPQSTHNESRICRTSTSCWELEATVSLGVSCETVGLRIRCAGEEPVQWVIVFSLVDETITIDRSRSSTRSDVNTCPEKGPFTLFYVTDGTRTEKLERFHLRVIVDADIVEIYANDRFALATMMYPGSHKAEREIVAFATGDNESARFEQVKIWDGLNGMEALVRDEGTAKPDNQSL

SEQ ID NO: 447 - protein, 601 aa, Unknown
  Description of Unknown: Aspergillus thermomutatus sequence
MSDHTPPRPTIHFTAPCWINDPCAPGYDPKTGLYHLFYQCNPYGCEWGNMSWGHITSKDLVTWTRSSGPAVIEPSEEYDKDGVFTGCFTPHVGDNPRENAQLRVFYSSVSHLPFHWSTPPYPRNAAGLAMATSRDGGAAWVKSHKNPVLRGEPEDIQVTGFRDPYISQWPAMDDARGMQQSAMYGVISGGVQDKGPTAFLYAIESEDLSQWKYLGPLVDNIPCRFQPSERWAGNYGLNWECTNLMTFSTGCGAASVEKHCLILGAEGDIERDHIRAHPRPSTLPPRTVRSLLWMFGDLVTSNNDRNGNEAHARFQFTSGGFLDHGSLYAANSFVDPTGRRIMYGWIPEEDVSLGYCERRGWNGALAVPRELFLLHIPKVTGTLRTPLSEICCCETFRRDGSSWVDIHTLGIRPIPELVTVRENCFSSQELNNISLPKPDSMLTPVSLIYHPCWELEATVCIKPTGCTSVGFYICQKTDPSTYISVIFSTVEETISVNRDASTRDPNINTSPEKGPFTLFFKGDTSGPDVALEKLHLRALWDTGILEVYANDRFALTTTVYFGDHSTENEILAFAAGDVDGAIFEEVKVWDGLNAMKSLFNE

SEQ ID NO: 448 - protein, 662 aa, Unknown
  Description of Unknown: Aspergillus turcosus sequence
MGKVWGKRQLRLTFDMLLPLPHVAELNRISAMRRKWQLNIGDDSPTPRLSSRSEFRYRRRVQMSNQTSPRPTIHFTALCWINDPCAPGYDPKTRLYHLFYQCNPYGCEWGNMSWGHITSKDLVTWTRSPGPAAIQPSEEYDKDGVFTGCFDPHIADNSREDAQLRVFYSSVSHLPFHWSTPPYPRNAAGVSMATSNDGGATWVKSHKNPVLRGEPEDIQVSGFRDPYISRWPAMDDARGIQHSAMYGVISGGIQDKGPTAFLYAIEGEDLTEWRYLGPLVDNILCRSQPSEKWTGNYGLNWECTNIMTFTTGCGAASTEKHCLILGAEGDVERDHIRAHPRPSTLPPRTVRSLLWMIGDLSTSSHDQTENEAHPRFQFTSGGFLDHGCLYAANSFVDPTGRRIMYGWIPEEDVPLEYCERRGWNGALAVPRELLLLCIPNVTGTLRTPLSEICCCETVRRNGSSLDAYTLGIRPISELSTVRENCFSSQEFNHISLPRPDSRLTPLSVVYYPCWELEATICIPPTGCESVGFYIRQKTDPSTYFSIIFSTVEETISIDRGASTRDPNINTCPEKGPFTLFFKEDTSGPNMALEKLHLRAIWDSGILEVYANDRFALTTMVYFRDHSTENEILAFAAGEAQSVIFEEVKVWDGLNAMNSLFND

SEQ ID NO: 449 - protein, 609 aa, Kluyveromyces sp.
MLKLLSLVVPLASAAVIHRRDANISAIASEWNSTSNSSSSLSLNRPAIHYSPEEGWMNDPNGLWYDAKEEDWHIYYQYYPDAPHWGTPLTWGHAVSKDLTVWDEQGVAFGPEFETAGAFSGSMVIDYNNTSGFFNSSTDPRQRVVAIWTLDYSGSETQQLSYSYDGGYTFTEYSDNPVLDIDSDAFRDPKVFWYQGEDSESEGNWVMTVAEADRFSVLIYSSPDLKNWTLESNFSREGYLGYNYECPGLVKVPYVKNTTYASAPGSNITSSGPLHPNSTVSFSNSSSIAWNASSVPLNITLSNSTLIDETSQLEEVGYAWVMIVSFNPGSILGGSGTEYFIGDFNGTHFEPLDKQTRFLDLGKDYYALQTFFNTPNEVDVLGIAWASNWQYANQVPTDPWRSSMSLVRNFTITEYNINSNTTALVLNSQPVLDFAGLRKNGTSYTLENLTLNSSSHEVLEFEDPTGVFEFSLEYSVNFTGIHNWVFTDLSLYFQGDKDSDEYLRLGYEANAKQFFLDRGHSNIPFVQENPFFTQRLSVSNPPSTNASTFDVYGIVDRNIIELYFNNGTVTSTNTFFFSTGNNIGSIIVKSGVDDVYEIESLKVNQFYVD

SEQ ID NO: 450 - protein, 616 aa, Kluyveromyces sp.
MLKLLSLLVPLASASIIQYQANVSAISSEWNATSNSSSSLSLNRPAIHFTPDKGWINDPNGLWYDAKEEDWHLYFQYNPESPHWDLPLYWGHAVSKDLTVWKDHGVSFGTKNESDGAFSGSMVIDYNNTSGFFNASVDPRQRVVAVWTLAEPDKQTQLLSYSHDGGYHFTEYEGNPVLDIDALNFRDPKVFWYDGAEDSEGHWIMAVAIPQKFSVAFYSSPDLKEWTLESDFTDKGFVGYQYECPGLVKVPYVRNTTFASTPNSNVTSSSPLSFNSTESWINSTSAAWNSSSVWNSSHTNSTLLNSTMFGNETVLQEALEESGFAWVLFLSINPGAPQGGSVNEYFIGDFNGTHFHPFDDQTRFVDLGKDFYAMQTFFNTPNQKDVFGIAWASNWQYGNHVPTTPWRSSMSLVRNFTVTEFNPNPNTTELVLSGVPVIDYSELRKNGTTYSIEDKQLSVSDSEVIELEDPTGVFEFSLEWSVNATNVKNYVFSDLSLYLQGDKHADEYLRLGFEANAAAFFIDRGHSNVPFVEENPFFTQRLSVNNPPSDYTSNTYDVYGVVDRNIIELYFNNGTVTSTNTFFFTTGNYISSIILETGVDDVYEVSNLRVNQFYAD

SEQ ID NO: 451 - protein, 500 aa, Bacillus sp.
MSTVNKISKKANYYTERYRPQFHYSPQKNWMNDPNGMVFYRDEYHLFYQYHPEGSEWGPMHWGHAISKNMVDWEHYPIALEPDALGMIFSGSAVVDWNDTTGFFGGKEGLVAVFTHHSKEEVQSQSIAYSNDKGRTWIKYNGNPVIPNEGIKDFRDPKVFWHNETNEWKMVIAAGQKVMLYSSPNLKEWTYLSDFGANEGAHGGVWECPDLFRLPVDGNIHQQKWVLQVDLGDGAIAGGSGSQYFIGDFDGTTFVNENKPSETLWVDYGRDFYAAQSFSDVLKEDGRRICMAWMSNWRYANKVPTTPWRSAMSIPREMELRQNDNGNIKLFQKPITELQTLRQSKVNISNEFVNGDKNVLANQEEDVFEIVAEIENLSAVEFGFKVRKSSLNKEETIVGYNFNKEELFINRENSGENSFSEEFSGRHAVKLTSSKESIRLHLFIDKSSVELFFNDGEVVMTDLIFPKEDSKELELYVIDGEVKVISLEVYSLRSIWNEQR

SEQ ID NO: 452 - protein, 473 aa, Bacillus sp.
MYDEQYRPQHHFSPKENWMNDPNGLVYYKGEYHLFYQYHPYSMVWGPMHWGHAVSKDLLHWEELPIALYPDELGQIFSGSAVVDAQNTSGLKTSDEDVIVAIFTHHGEDNEKQSIAYSNDRGRTWVKYEGNPVIPNPGQKDFRDPKVFWHEESGKWVMSLASGDCIRFYGSPNLIDWGLLSEFGREYGAHGGVWECPDLIQLQVDGEDQKKWVLIVSINPGGPNEGSAVQYFVGEFDGMEFICDVRPEVVKWADFGRDFYASVTWSNHPEPIWIGWMSNWQYANQVPSEPFRSAMSIPRKLGLRRVDGEFTLIQSPIDLFSLFKKVAVSNETITLRSSETYQVELDNRPLFAKANVMNSTASEFLITFRGEQEQLCIVFDPERKEVRIDRKESGQVSFSEHFASVDRMPVSEFNDFTLILDKTSIELFVNQGSSVMTELFFPLDSEFTLEFKVLDGEVVLENVELHHLESTWK

SEQ ID NO: 453 - protein, 626 aa, Unknown
  Description of Unknown: Aspergillus carbonarius sequence
MKLPPAAVLLSTHSAMQSRSSILLDYNVAPPNLSTLPNGSLFDTWRPRAHVLPPTGQVGDPCMHYTDPATGLFHVGFLHDSEGISGATTDDLATYHDLNPNGSQSIVPGGINDPLAVFDGSVIPAGIDGLPTLLYTSVSYLPIHWSIPYTRGSETQSLAVSSDGGRNFTKLAQGPVIPGPPFAYNVTAFRDPYVFQNPTLDSLLHSPNNTWYTVISGGLHGKGPAQFLYRQYDPDFQYWEYLGPWWHEPTNSTWGSGIWAGRWGFNFETGNIFTLDTDGYNPDGQFFATLGTEGSNQPIIPQLTSIHDMLWVSGIVSNNDSVAFTPTMAGFLDWGFSSYAAAGKILPATSQPSTNSGAPDRFISYVWLSGDLFEQAEGFPTSQQNWTGTLLLPRELHVLSLPNVVDNALSRESGASWRVVHRDADTHTVTLQTLGISIARETKTALLSGTSSTEPSRTLSTTTTVPFQHSPSSKFFVLSATLTFPASARNSSTLQSGFTILASEYESTTIYYQFSNESIIVDRNNTSAAARTTNGIDSSSEAGKLRLFDVLSEGGEKVIETLDLTLVVDNSVLEVYANGRFALSTWVRSWYANSTGISFFQNGEGEVKFENVTLSEGLYDAWPDRT

SEQ ID NO: 454 - protein, 628 aa, Unknown
  Description of Unknown: Aspergillus ellipticus sequence
MKLPSAATGLFLGTAAATPLSLRSSTLNYNMAPPNLSTLPNNSLYETWRPRAHVLPPNGQIGDPCMHYTDPATGVFHVGWLHDSAGIAGATTSDLATYTDLNPNGGQAIVPGGINDPVGVFDGSVIPSGINGLPTLLYTSVSYLPIHWSIPYTRGSETQSLAVTTDSGRNFTKLDQGPVIPGPPFAANVTAFRDPYVFQNTQLDTLTSSQSNTWYTVISGGIHNQGPTQFLYRQYDPDFQYWEYLGQWWSEPTNSTWGDGTWAGRWGFNFETGNVFSLNEEGYTADGEIFGTLGTEGSDLPIVKQLTSIHDQLWVAGSVAKNTNGSVEFTPSMAGFLDWGFSSYAASGKVLPATSKPSTQSGAPDRYISYVWLTGDQYGQAEGFPTNQQNWTGALLLPRELKVQSLDVVDNALSREEGASWRVESNNTDAGTVELRTLGISIARETEAKLLSGKPSVEAGRTVSSAGVLPFQHSPESKFFVLKTNISFPASARQSGLQTGFQILASESEHTSIYYQFANESVVIDRSNTSAAAQTTSGIDSFTESGKLRLFDVLDGGEESVETLDLTIVVDNSILEVYANGRFALSTWVRSWYANSTEIRFLHNGVGQATFSNVTVSEGLYNAWPERA

SEQ ID NO: 455 - protein, 640 aa, Unknown
  Description of Unknown: Aspergillus heteromorphus sequence
MVAHSAAASTPLSVPSSSSSRSTIPSTIPNYNVAPPNLTTLPNNSLFDTWRPRAHILPPTGQIGDPCMHYTDPSTGLFHVGWLYNGAGIAGATTADLAMYQDLNPNGSQAIVPGGKNDPVGVFDGSVIPEGIDGLPTLLYTSVSYLPIHWSIPYTRGSETQSLAVTNASSAGRNFTKLPQGPVIPSPPFAANVTAFRDPYVFQSPHLDAILPSGPTNLSTAPWYTVISGGIHNAGPTQFLYRQHDPDFQYWEYLGQWWSEPTNSTWGNGTWAGRWGFNFETGNVFALDAEGYNPSGEIFGTLGTEGSDLPIIPQVTSIHDQLWVAGNVSMTDSDSVTFTPSMAGFLDWGFSSYAASGKVLPSSSQPSTDSGAPDRFISFVWLTGDLYQQAEAFPTDQQNWTGSLLLPRELTVLAIDNVVDNALSREAETSWRVSSTDAASGTVTLRTLGISIARETKSKLFSGSGSTSTERDRTLTSAGVTPFSRSPESKFFVLSARISFPSSARDSALQSGFQILSSDEEHTSIYYQFSNESIVVDRSKTSAASRTTEGIDSATEAGKLRLFDLQKDGEDVLESLDLTIVVDNSILEVYANGRFALSTWVRSWYANSTEIRFVHNGVGEATFENVTVSEGLYDAWPDRK

SEQ ID NO: 456 - protein, 621 aa, Unknown
  Description of Unknown: Aspergillus wentii sequence
MKLAAAAVVGATQAAAAVYPRAASVDYNAAPPNLSTLDNGTLFDTWRPKAHVLPPSGKIGDPCMQYTDPKTGTFHIGFLHEGIAGATTDDLATYRDLREGGAPSIVAGDKNDPLAVFDGSVIPNGIGGNPTLLYTSVSYLPIHWSIPYTRGSETQSLAVSYDGGRNFTKLQQGPVIPNPPFAVNVTAFRDPYVFQNPKLDAASNSTKGTWYTAISGGVHESGPSQFLYRQYDSDFQYWEYLGQWWHEPTNTTWGNGDWAGGWGFNFEVGNIFSLDGEGYNLDGEIFVTLGTEGSLAPVTPQVTSIHDMLWVAGDVSNNGSIAFTPTMAGVLDWGLSGYAAAGKILPASSKAASKSGAPDRFISYVWLTGDEYEQAKTFPTAQQNWTGTLLFPRELNVQTISNVVDNALARETGSSWRVASADSGHVELKTMGINIARETRKALASGTSRVESGRTLNSSGLIPFKQSPESKYFMLTANISFPSSARTSDVKTGFQILSSGLENTNIYYQFSNESIIVDRTNTSAASKTTEGITAANEAGRLRLFDIAQDGVEKIETLALTIVVDNGVLEVYANGRFALSTWARSWYTNSTNISFFHDGAEKATVSDVTVSEGLFNAWPERK

SEQ ID NO: 457 - protein, 623 aa, Unknown
  Description of Unknown: Penicillium arizonense sequence
MKLSSAIFVFLADRAACAVFSREVSSVDYNSAPPNLSTLANATLFNTWRPRAHILPPSGKIGDPCMHYTDPKTGLFHVGFLHDGIAGATTDDLATYTDLMPDGRPSIVAGGKNDPLAVFDGSVIPNGIDGLPTLLYTSVSYLPIHWSIPYTRGSETQSLAVTYDGGRNFTKLSQGPVIPSPPFALNVTAFRDPYAFQNPALDSALNSTQGTWYIAISGGVHNIGPCQFLYRQHDAGFQYWEYLGQWWQEPVNTTWGNGDWAGGWGFNFEVGNVFSLNEDGYSEDGELFMTLGTEGSEAPVTPRVTSIHGMLWVTGNITKGDSVAFTPTMAGFLDWGLSSYAAAGKILPATSKASAKSGAPDRFISYVWLTGDQFELATGFPKAQQNWTGTLLLPRELKVETLPNVVDNELAREPLSSWRVSREESGQVDLQTMGISIARETYDALTSGSSSVEAGRTLSEAGDVAFETSPSSKFFVLTANISFPSSARGSDLQSGFKILSSELESTSIYYQFSNESIIIDRSNTSAAAKTTDGISSDNEAGRLRLFDIAQNGAENIEILELTIVVDSGVLEIYANGRFALSTWARSWYANSTDISFFHNGVGEVTFGNVTVFEGLYNAWPQRK

SEQ ID NO: 458 - protein, 618 aa, Unknown
  Description of Unknown: Penicillium griseofulvum sequence
MKLSGSVTVGLASCAFAHKSQIDYNSAPPNLSTLSNASLFDTWRPKAHLLPPSGKIGDPCGHYTDPKTGLFHVGWLHNGISGATTDDLATYKDLNPDGAPSIIPGGKNDPLAVFDGSVIPSGINGMPTLLYTSVSYLPIHWSIPYTRGSETQSLAVSYDGGRNFTKLNQGPMIPSPPFAVNVTAFRDPYVFQSPALDTAANSTQGTWYTAISGGVHDVGPCQFLYRQHDADFQYWEYLGQWWNEPANTTWGTGDWAGGWGFNFEVGNVFSLNADGYSEDGEIFMTLGTEGSELPIVPQVSSIHDMLWVAGKVTNDGSITFKPTMAGVLDWGLSAYAAAGKVLPASSQAAIKSSAPDRYITYIWLTGDFYELAKGFPTAQQNWTGTLLLPRELNVRTIPNVVDNKLARESLSSWRVARKGHGQIDLETMGISIARETYSALTSGSSFVESGRTLSKAGSVTFNTSPSTKFFVLTANVTFPKSARDSDIQAGFQILSSNLESTTIYYQFSNESIIVDRSKTSAAAQTTDGISSDNEAGRLRLFDILHNGQEQIETLELTVVVDNGVLEVYANGRFALSTWARSWYANSTEINFFHNGVGEATFGDVTVFEGLYDAWPQRK

SEQ ID NO: 459 - protein, 618 aa, Unknown
  Description of Unknown: Aspergillus tanneri sequence
MKPSTTALLATAAVAVAVDYNTAPPNLSTLANGSLYNTWRPRAHVLPPSGRVGDPCMHYTDPTTGLFHVGYLHNGSGISVAITDNLTTYHDLNPGGVQSIVPGGINDPVAVFDGSVIPRGINDTPTLLYTSVSFMPIHWSIPYTRGSETQSLAVSTDGGHNFTKLSQGPVIPSPPFALNVTGFRDPYVFQNPALDDTLSSAPGTWYTVVSGGVHDVGPSLFLYRQHDMDFQYWEYLGQWWHEPANTTWGDGIWAGRWGYNFETTNVFTLNEEGYSSDGEIFLTFGAEGSQAPIQKQVSSIHDMLWASGSISTNDGFVTFTPTMAGVLDWGVSAYAAAGKILPADSQAGMKSGAPDRFISYVWLTGDLYEQAKGFPSAQQGWIGTLLLPRELTVRRILHVVDNALVSEEGSWRMQQRKHNNSVELTTLGMNIARETYDALVSGPSIEEPAREMQSASVVPFRHSPRSKFFVLTAKLSFPKSARESGIRSGFQILSSQLESTTIYYQFSNESVIVDRSNTSAAAQTTAIDYANEAGRLRLFDVFEDGEEEIESLDLTIVVDNSVVEVFANGRFALSTWARSWYANSTEIRFYHNGVDEVRFSDVVVSEGLFDAWPERHGI

SEQ ID NO: 460 - protein, 618 aa, Unknown
  Description of Unknown: Aspergillus steynii sequence
MKPTSAALLLLAGQAVDAIDYNAAPPNLSTLANGSLFETWRPRAHVLPVSGKTGDPCMKYTDPKTGLFHVGWLHNDSGITGATTDDMVTYRDLNGGGPSIVPGGINDPLAVFDGSVIPRGINGTPTLIYTSVSFLPIHWSIPYTRGAESQSLAVSYDGGRNFTKVNQGPVIPEAPFGVNVTAFRDPYVFQNPQLDTLSDSSVGTWYTVVSGGVHDVGPSQFLYRQTDPDFQYWEYLGEWWREGVNTTWGDGTWAGGWGFNFETGNIFGLNDEGYDPEGEVFNTLGTEGSNAPIKRELSSIHDLLWTAGKISNNGSIKFTPTMAGVLDWGASAYAAAGKVLTADSQASKKSGAPARFVTYPWLTGDEYGQAKLFPTRQQNWTGTLLLPRELHTLSIHNVVDNELARETGVSWRVQGKSKSGTLELKTLGIDIARETYNALTRGSSTDESDRKLSNQSTPVPFAKSPENKFFVLRANLTFPQSARKSGLKSGFQILSSEFESTNIYYQFSNESIIIDRSNTSAAAQSTSGITTYNEAGRLRLFDVVEDGAEKIESLELTIVVDNGVLEVFANGRFALSTWARSWYAKSTGIKFLHNGVGQVQFSDVSVSEGLFEAWPERQ

SEQ ID NO: 461 - protein, 665 aa, Unknown
  Description of Unknown: Aspergillus hancockii sequence
MRPIPHLRPRSVADSKGIIMQKILLNLLPGSCREVLQPILPHNTAMKISSTAVPLVTSQAAYAAAIDYNAAPPNLSTLANGSLYDTWRPRAHVLPPMGRIGDPCAHYTDPTTGLFHVGWLYNGSGISGATTDDLVQYRDVNPNGSQFITPGGKNDPIAVFDGSVIPKGVDGKPTLLYTSVTSLPIHWSIPYTPGAETQSLAVSNDGTGRNFTKLDRPPVIPLPPSDLDVTAFRDPYAFQSPELDAAASSAPGTWYAAISGGVHEEGPGQFLYRQNQQEMDLENWEYLGLWWHEGVNTTWGNGDWAGGWGFNFEVGNTFGLNEEGYSLDGEMFMTLGTEGSGTPIVSQLSSIHDMLWVAGNVTKDGNVTFTPSMAGVLDWGVSGYAAAGKILPATSKASQKSGAPDRFISYVWLTGDLYEQAKGFPTSQQNWIGTLLLPRELRVQTISNVVDNELARETGASWRAESGTNGIELKTMGIDIARETRDALLSGPKIAEPERTLKTAGVVPFQVSPTTKFHVLTAQLSFPRSARNSGIQAGFQVLSSELESTTIYYQFSNESIIVDRSNTSAAAKTTNGIVSTNESGRLRLFDLEDADQEVETLDLTIVVDNAVLEVYANGRFALGTWARSWYQNSTEIKFFHNGEGEVTFSNVSVSEGLFEAWPERS

SEQ ID NO: 462 - protein, 622 aa, Unknown
  Description of Unknown: Aspergillus flavus sequence
HVTMKLSTASALVTSQAAYAASAIDYNAAPPNLSTLANGSLYDTWRPRAHILPPNGRIGDPCGHYTDPDTGLFHVGFLYNGSGIAGATTDDMVRFRDLNPNGSQFITPGGKNDPVAVFDGSVIPKGIDGKPTLLYTSVTSLPIHWSIPYNPGAETQSLAVTSNGGRNFTKLDRPPVIPLPPSDSDVTAFRDPYAFQSPELDAAADSAPGTWYTAISGGVHEDGPGQFLYRQDQKEMSLESWEYLGLWWQEKVNTTWGNGDWAGGWGFNFETGNVFGLNEEGYSVDGEMFMTLGTEGSGTPIVSQVSSIHDMLWAAGNVSNNGNVTFTPTMAGVFDWGASGYAAAGHILPATSQVSTKSGAPDRFISFVWLTGDLFEQAKGYPTSQQNWVGTLLLPRELHIKTISNVVDNELAREEGSSWRVERGQSGIELKTLGIDIARETREALMSGPKITEPERTSKEAGLVPFQVSPTTKFHVLTAQLSFPRSARNSDLQAGFQVLSSDLESTTIYYQFSNESIIVDRSNTSAAAKTTNGIVSTNESGRLRLFDLQGDAQEIETLDLTVVVDNSVLEIYANGRFALSTWARSWYKNSTDIKFYHNGAGEVTFSNVTVSEGLFEAWPERV

SEQ ID NO: 463 - protein, 2645 aa, Unknown
  Description of Unknown: Penicillium coprophilum sequence
MSNSPDHEENDAILVGPDDVRDFNVDNVLPLPASDIVEIRKWLQPTAYDLERSEYSRHRLSHLAGTGKWLTSTTTYQRWHQGDENGILWVKGIPGSGKSVLAASIINQLRKDGIPVIFFFFRQIIDANHQPVAALRDWLCQVLGYSPPLQVKLKEYMDDRRDLASLSPSDLWRDLKVALVACPRVYCVTDALDEMDLGNDEFLHSLVELGHWRPSNVKVLITSRPVSIVENSLRSFSIPQIRLEETLVDLDIASYVQYKLRHSSIDPESWSVIEEAIPGRANGLFLYAKLSMDAFLEPGVDAHEVLKALPADLNVMYNDLLHEHARRSNVPEDFQLLVLQFVTHATRPLRILEIAEMAKTVQASTSRSLKETKDLVRAACGPLLEILPDETVSVVHHSFTEFLKGFTRSSELEDETYPILQTGLTNKCLAIACLTYLRSGCLVHQELEEASNSYEYGNPKAKEHLELKLRFPFLMYAANNWYTHIRRAVFAGVDISSFYAMLDTFFADKQMFTAWRVLSWPTHKTRGITALHVAAWAGLDEYVAYLLERGNNIEVRDDCHNTPLYWAATSGYPGVVQLLLANGADPNAEQNGGYSSLHVAAERNHAAVAKLLLAAGVNPLTPKMQDSPRGIGCGNSPTSLGHTPLMYACHHGHVNTVAEFLPFLKDSQAYHRALYWAAHHWQCAVIELIIQYPGVNLNGKYRGDTALFIACLKGDEKTVDVLLRAGADPNIYCEQAPDEFYRGVYHTRYSESDEDQECKRGYTALHALCKSGRDMRTPELLPACLYSLLQAGADIDARTPSGKTALHIACQHQKADVVTILLEAGANAAAEDCSGATPLHTNGGMDAELLPVLLSTGVVDINKVTAKTGKTPLHVRLQGLWVKDVLPFLKYKPDVNISDDKGDSPLHYAFAAHGQILSRVVDTLISLGANPNAMNDEGNSPLHTMTEHTSPLISKLLDAGADLEAQNHDGQTALFKHANRDKEPFDTLIALGARLDTRDSGGRTLLHRCYNDTNRLDYLIGLGLDPLATDHQGNSLLMEVAATEDDYTHPAIMEHLITLGLDIDVPNHRGRTTLHVLCARVGLVTNSFPPEYSLDYVLGVCKNPNPSDCDGVQPLHLAATISESYVIKLLNAGANMLKVTHEGMSVLHTAARARQPNIVALCCSRLSALGDQDKTAFLNKQTKDGETALHYACRSGRPETVRTLLEAGADPTILDNGRRSPFRACAQFETEEKLWSGPKRIPQREFLHAAGVLVNDHKRPFLVPPRRDESEDCNQQNAEHDTVRLDEILDLLVCHGALSPGKNCFHGAFDEAISNGLEYTVDCLSRLESRLPDSNPCPIEGLSYAICKGRLDATREAFRKYGGLDDDHDDSSESSRLDYAYMRNLVFARQYELFEEGVKRLNSSRLNYPTSFLLHFLVAWGYRDLLDRVCTKDAALRFDDHNWCQEVSFQPGGCYVDPLLVTACNRALPNMDVVEFLVEKVGVSLDAHFMESSLFKHSKVAGGALHKLALGHNWWHVYKALPYLIKKGANLGLRDENGVTPLHKALHTRHERGPFLRDAAKLLIESGADVNAVDANGDTCLSKAGGDLEMTRLLIAHGAHINAAAIFSVIEYGEVEVLETLLSHGDFANVRRSEPVIPRQKSDYDANILDSEVSPLLFSRVPNLRYTKNYFTNRRSQLDDSASSLLDNRIMEVLLNHGADPFATYVGEIFPRSPRGSLEWRLFSHLEDPDISNPEIEPPRKTVIHEILKSRHSSWPFFQLPSLELERRDSSGCTLLLAASQSAHALYEKMDFVEGGTAIAKTIFQELIDRGADVMAQDNNGNTILHHMCSPRGSFLYKIPLGGYSDLLETLHEVVIKNPGLVHLRDRKGDSIFHRTLALENFDFIDPLLQVGVDPLQSDSNGDTALHHLAKHLTEDEPLAHFKRFLELGVDINSRNHHGDTPLFRYIQNGVVIPKSRRTERFEKEDDLTETVFDFFEEAGADFLAQNDAGSSLLHILASKKNYDDGYSDEYPYNVVRRFKILMGRGLDPMLEDVHQRTSLDVAAVHGTPPNLSTLTNASIFETWRPRAHILPPSGKIGDPCGQYTDPKTGLFHVGWLHEGIAGATTDDLATYRDLNPDGAPSIIAGGKNDPLAVFDGSVIPSGIDGLPTLLYTSVSYLPIHWSIPYTRGSETQSLAVSYDGGRNFTKLDQGPMIPSPPFAVNVTAFRDPYAFQSPALDIAVNSTRGAWYTAISGGVHDVGPCQFLYRQHDADFQYWEYLGQWWNEPVNTTWGNGDWAGGWGFNFEVGNVFSLNADGYSEDGEVFMTLGTESSEVPIVPKVSSIHDMLWVAGNITNDGSVTFNPTMAGVLDWGLSAYAAAGKILPANSQASKKSGAPDRFISYTWLTGDLYELSKGFPSAQQNWTGTLVLPRELNVHTIPNVVDNKLSRESLASWRVSRERHGQIDLETMGISISRETYSALTSGSPSVETDQTVSEAELKAFGISPSTKFFVLTANISFPTSARDSGIQSGFQILSSDLEFTTIYYQFSNESIIVDRSNTSAASKTTDGISSANEAGRLRLFDVLQNGKKQIETLELTVVVDNGVLEIYANGRFALSTWARSWYANSTGINFFHNGVGEASFGDKASCVVEFDFDDNDPPPVISG

SEQ ID NO: 464 - protein, 583 aa, Unknown
  Description of Unknown: Penicillium vulpinum sequence
MKLSTGISVILANRAVAFNLHKSHIDYNSAPPNLSTLPNASLFDTWRPRAHLLPPSGKIGDPCGQYTDPKTGLFHVGWLHDGIAGATTDDLATYQDLNPNGAPSIIAGGKNDPLAVFDGSVIPNGIDGMPTLLYTSVSYLPIHWSIPYTRGSETQSLAVSYDGGRNFTKLSQGPMIPSPPFAVNVTAFRDPYAFQSPVLDKAINSTQGTWYSAISGGVHDVGPCQFLYRQHDTDFQYWEYLGQWWNEPVNTTWGNGDWAGGWGFNFEVGNVFSLNTDGYSENGEVFMTLGTEGSEAPILPQVSSIHDMLWVAGNITNDGSLAFNPTMAGVLDWGLSAYAAAGKVLPASSQAAAKSGAPDRFISYLWLTGDLYELAKGFPTAQQNWTGTLLLPRELNVRTIPNVVDNELSRESLASWRVSREGTGDVDLQTMGISIARETYSALTSGPSFVESGKTLSKAGLVAFNTSPSSKFFALAANISFPVSARDSGIQAGFQVLSSGLESTTIYYQFSNESIIIDRSNTSAAAKTTDGILSDNEAGRLRLFDVLENEKERIETLELTVVVDNGVLEVYANGRFALSTWTR

SEQ ID NO: 465 - protein, 655 aa, Unknown
  Description of Unknown: Aspergillus coremiiformis sequence
MQLFTPHPPRKHLTMKLSSTAVPLITSQVAYAASAIDYNAAPPNLSTLASGALFDIWRPRAHVLPPHGQIGDPCAHYTDPETGLFHVGWLYNGTGMSGATTDDLVKYRDINPNGSQTIIPGGKNDPVAVFDGSVIEKGIDGKPTLFYTSVSSLPIHWSIPYHRGAESQSLAVSLNGGHNFTKLDRPPVIPLPPSNLSVTAFRDPYAFQSPELDTAAKSASGTWYAVISGGIHGKGPCQFLYRQNQKAMNLEKWEYLGEWWQEKTNTTWGNGDWAGGWGFNFEVGNVFSLNEEGYSSEGEMFFTVGGEGSGTPIVPQLSTIHDMLWVAGKVSSHRNVSSHGSLSNHRNVSNHGPVTFTPSMAGVLDWGASGYAAAGKILPATSKASTRSGAPDRFISFVWLTGDLYGQVQGFPTSQLNWVGSLLLPRELHIQTISNVADNELSREPGASWRVERSQSSASGIALKTMGIDIARETREALLSGPKITEPKRTSTAAGVVPFHVSPATKHYILTAQLSFPRSARHSDIQAGFQVLSSDLESTTVYYQFSNESIVVDRSRTSAAAKTTNGILSANESGRLRLFDLQGGAEEVETLDLTIVVDNSVLEVYANGRFALGTWTRSWYQNSTGINFFHEGAGEVTFNNVSVSEGLFEAWPERA

SEQ ID NO: 466 - protein, 648 aa, Unknown
  Description of Unknown: Aspergillus homomorphus sequence
MKLTTTTTLAATAATAAAYQLDTTLPPPSNLSTLPNNTLFNVWRPRAHILPAKGQIGDPCAHYTDPATGLFHVGFLHDNEGIAGATTANMATFTDTSSNGSFLIQPGGKNDPVAVFDGSVIPSGVNNTPTLLYTSVSFLPIHWSIPYTRGSETQSLAVARDGGRRFEKIAQGPVIPDHPFALDVTAFRDPFVFRSARLDALLAAEGNETAAQLAQAAWTEKGTPWYAAISGGVHESGPSQFLYRQNEGNASDFQYWEYLGEWWHEPTNSTWGPNDEGTWAGRWGFNFETGNVLFLTEEGHDPKTGEVFVTLGTEGSNAPVKPQVSSIHDMLWAAGEVGVDGTDGKLHFTPTMAGYLDWGFSAYAAAGKVLPATSAVSKNSGVDFDRFVAFIWLTGDQYEQADGFPKYAQGWTGSLLLPRELKVQTIENVVDNDLVREEGVSWVVGESDNTTATLRTLGITIARETKAALLGNSSAVEEEDRTLRTAAVVPFQQSPASKFFVLTAQLEFPASARTSNIQSGFEILASELESTTVYYQFSNESLVVDRSNTSAAAPTNPGLDSFTESGKLRLFDVVEDGREKVETLDLTIVVDNSIVEVYANGRFALSTWARSWYDNSTQIRFFHNGEGEVQFKNVAVTEGLYNAWPERE

SEQ ID NO: 467 - protein, 595 aa, Unknown
  Description of Unknown: Aspergillus leporis sequence
MKLSSTAVPLVTSQAAYAASSIDYNAAPPNLSTLANGSLYDTWRPRAHVLPPIGRIGDPCAHYTDPATGLFHVGWLYNGTGISGATTDNLVQYRDVNPNGSQFIIPGGKNDPVAVFDGSVIPNGIDGKPTLLYTSVTSLPIHWSIPYTPGAETQSLAVSTDGSGRNFTKLDRPPVIPLPPSDLDVTAFRDPYAFQSPELDNAANSVPGTWYAAISGGVHQAGPGQFLYRQSQQEMDLENWEYLGQWWHEGVNTTWGNGDWAGGWGFNFEVGNTFGLNEEGYSLDGEMFMTLGTEGSGTPIVSQLSSIHDMLWVAGNVTNDGNVIFSPSMAGVLDWGVSGYAAAGKILPATSKASQKSGAPDRFISYVWLTGDLYEQAKGFPTAQQNWTGTLLLPRELRVQTIPNVVDNELARETGASWRVESSSDGIELKTMGIDIARETREALLSGPKITEPERTLKNAGVVPFQVSPTTKFHVLTAQLSFPRSARNSNLQAGFQVLSSDLESTTIYYQFSNESIIVDRSNTSAAAKTTNGIVSTNEAGRLRLFDLEGADQEVETLDLTIVVDNAVLEVYANGRFALGTWARYVISSSRDQGVG

SEQ ID NO: 468 - protein, 628 aa, Unknown
  Description of Unknown: Aspergillus ruber sequence
MKGSTAVELLAVSWAGVGAALDYNAPPGNLSTLPNSTLFETWRPKIHVLPPTGQVGDPCAHYSDPETGLFHVGYLHNGSGIATVQTDDLVHYYDVNKNGNFSLTPGGANDPVSVFDGSVIPSGVDGKPTMIYTSVSSLPIHWTLPYTRGSESQSLAVTSDGKNFTKFDIPPVIPGPPAGLDVTAFRDPFVFQNKELDRTLNSAKGTWYVTISGGVHDVGPSIFLYRSKSSNFEQWEYLGEWFNAPSNSTWGNGDWAGVYGFNWETVNVFGLDKQGYNYNGDSFMTFGVEGSYMPIQKAVSSLHAQLWAAGSVSTVDGNVTFNPNMVGFLDWGLSAYAAAGKVLPSTSKASSRSGAPDRFISYVWLTGDVFEAVKDFPKAQQGWQSTLLLPRELSVHTIPNVVNNDLVHETASWRVASNSSAGSCVELETLGVNIARETYNAITAAPSFSEPSRKLSKAGIVPFNRSPDSKFFVLNAQISFPQSARGSGLKSGFQILSSELESTTIYYQFSNESIVIDRYNTSAASQTTSGINSDPESGRLRLFDINNSCNGSGKDKNEHMETLDLTIVVDNSVLEVYANSRFALSTWARSWYANSTEIRFFHDGEGETSFSNIQVSDGLYDAYPERLR

SEQ ID NO: 469 - protein, 751 aa, Unknown
  Description of Unknown: Aspergillus indologenus sequence
MSAIAPFQIDSRELSVGETPGKTSAISSAPFSPQPWQCGISPKSRRIYGDSSYDDAQGSALSRTGHHERSSSKQQRKRHIKRPAPPRWQDSRSPSTQSITMKLTSTTHLALATGAAASYHLDTTAPPPTNLSTLPNNTLFHLWRPRAHILPAEGQIGDPCAHYTDPATGLFHVGFLHDGEGIAGATTANLATYTDTSSNGSFLIQPGGKNDRVAVFDGAVIPVGVNNTPTLLYTSVSFLPIHWSIPYTRGSETQSLAVARDGGRRFEKLDQGPVIADHPFAVDVTAFRDPFVFRSARLDALLSLDAEVARNETAVQDAVDAWTEKNAPWYVAVSGGVHGVGPGQFLYRQNAGNSSEFQYWEYLGEWWQEATNSSWGAEGTWAGRWGFNFETGNVLFLTEEGHDPKTGEVFVTLGTEGSGLPIVPQVSSIHDMLWAAGEVGVGGADGAKVEFSPSMAGFLDWGFSAYAAAGKVLPASSAVSQNSGVEVDRYISFVWLTGDQYEQADGFPSAQQGWTGSLLLPRELKVQTVENVVDNALVREEGVSWVVGESNNKTATLRTLGITIARETKAALLANGSVTTEEDRTLQTAAVVPFTQSPGSKFFVLTAQLEFPASARASDLQSGFEILASELERTTVYYQFSNESLVVDRSQTSAAAATNPGLDRFTESGKLRLFDVVENGQEKVETLDLTVVVDNAVVEVYANGRFALSTWARSWYDNSTQIRFFHNGEGEVQFKNVSVSEGLYNAWPERK

SEQ ID NO: 470 - protein, 967 aa, Unknown
  Description of Unknown: Aspergillus fijiensis sequence
MHFHPEVVFLGGLGLLMGASSSPLPSRPSTPLPEDSAVALSPNTTTGNPLPDLTHLTITPREKDTNVEIVCHNHVFTRDHVKAAVKQAKRIHEAKEEHPHDYAEFPKPLDRRASDLFKKPDELFQFPLVADGVYDGKADVTGCEFVIVDKNLRCKGAVRYYDDHGEDKGHADACYARKRKDKDGTGKGKGKDKEKRKGGGGAGGGGGHASGHASGGHGGGRTGVIVAGGAHGADEGNYDIDSRELAVGETPGKTSAISSAPFTPQPWKVCSEQDITEVAAAAAAQASAQATYKAPHLPGGKTLLEAIQSRSITMKLTTTTLALATGAAAAEASYHLDTTAPPPTNLSTLPNNTLFYVWRPRAHILPAEGQIGDPCAHYTDPSTGLFHVGFLHDGDGIAGATTANLATYTDTSDNGSFLIQPGGKNDPVAVFDGAVIPVGVNNTPTLLYTSVSFLPIHWSIPYTRGSETQSLAVARDGGRRFDKLDQGPVIADHPFAVDVTAFRDPFVFRSARLDVLLSLDEEVARNETAVQQAVDGWTEKNAPWYVAVSGGVHGVGPAQFLYRQNGGNASEFQYWEYLGEWWQEATNSSWGDEGTWAGRWGFNFETGNVLFLTEEGHDPQTGEVFVTLGTEGSGLPIVPQVSSIHDMLWAAGEVGVGSEQEGAKVEFSPSMAGFLDWGFSAYAAAGKVLPASSAVSKTSGVEVDRYVSFVWLTGDQYEQADGFPTAQQGWTGSLLLPRELKVQTVENVVDNELVREEGVSWVVGESDNQTATLRTLGITIARETKAALLANGSVTAEEDRTLQTAAVVPFAQSPSSKFFVLTAQLEFPANARSSPLQSGFEILASELERTAVYYQFSNESLVVDRSQTSAAAPTNPGLDSFTESGKLRLFDVIENGQEQVETLDLTVVVDNSVVEVYANGRFALSTWARSWYDNSTQIRFFHNGEGEVQFRNVSVSEGLYNAWPERN

SEQ ID NO: 471 - protein, 634 aa, Unknown
  Description of Unknown: Aspergillus japonicus sequence
SYHLDTTAPPPTNLSTLPNNTLFHLWRPRAHILPAEGQIGDPCAHYTDPSTGLFHVGFLHDGDGIAGATTANLATYTDTSDNGSFLIQPGGKNDPVAVFDGAVIPVGVNNTPTLLYTSVSFLPIHWSIPYTRGSETQSLAVARDGGRRFDKLDQGPVIADHPFAVDVTAFRDPFVFRSARLDVLLSLDEEVARNETAVQQAVDGWTEKNAPWYVAVSGGVHGVGPAQFLYRQNGGNASEFQYWEYLGEWWQEATNSSWGDEGTWAGRWGFNFETGNVLFLTEEGHDPQTGEVFVTLGTEGSGLPIVPQVSSIHDMLWAAGEVGVGSEQEGAKVEFSPSMAGFLDWGFSAYAAAGKVLPASSAVSKTSGVEVDRYVSFVWLTGDQYEQADGFPTAQQGWTGSLLLPRELKVQTVENVVDNELVREEGVSWVVGESDNQTATLRTLGITIARETKAALLANGSVTAEEDRTLQTAAVVPFAQSPSSKFFVLTAQLEFPASARSSPLQSGFEILASELERTAIYYQFSNESLVVDRSQTSAAAPTNPGLDSFTESGKLRLFDVIENGQEQVETLDLTVVVDNAVVEVYANGRFALSTWARSWYDNSTQIRFFHNGEGEVQFRNVSVSEGLYNAWPER

SEQ ID NO: 472 - protein, 649 aa, Unknown
  Description of Unknown: Aspergillus hancockii sequence
MKLPSAAEVLVARQAAGAAGIDYNAAPPNLTTLPEGSLFETWRPKIHVLPPAGQIGDPCAHYNDPATGLFHVGFLHNGTGISAVQTDDLVHYVDVNPGGGYVIVAGGPNDPLAVFDGSVIPSGIDGEPTLLYTSVSSLPIHWTIPYTPGAETQSLAVTYNGGHNFTKLDRPPVISSPPPGLDVTAFRDPYVFKNDHLDEASGSTPGTWYATVSGGVRDVGPGIFLYRNVGDNYEDWEYLGEWWREPANSTWGNGDWAKVWGYNFEVGNVFSLDKNGYNVGGETFITLGVEGSFAPIIPQVTSMHGMLWAAGETSRPAGANVTFEPTMAGVLDWGTSSYAAAGKVLPSTSQASAQSDAPDRFISYVWLTGDVFGAVAGFPSAQQGWQNTLLLPRELSVKTIRNVVNNELVREVGSWRVTESITDKCVELETLGIKIARETYGAATSNNSFVEPGRTLHDAGVVPFRRSPVTKFFVIDASISFPKSARNSSVKAGFQILSSELESTTIYYQFSNESIFIDRSNTSAAALTTPGIDTAPESGRLRLFDVQGHCDKEGKGKKDKGKEGKDHDKPEGYGDDDDAAIETLDLTIVVDNSVLEVYANSRFAISTWARTWYANSTDISFFHNGEGAVTFSDIRVSDGLYVAFPQREA

SEQ ID NO: 473 - protein, 598 aa, Unknown
  Description of Unknown: Aspergillus avenaceus sequence
MKLSSTAVPLVTSQAAYAASAIDYNAAPPNLSTLANGSLYETWRPRAHLLPPTGRIGDPCAHYTDPSTGAFHLGWLYNGTGISGATTDDLVKYRDLNPNGGQIIVPGGKNDPLAVFDGTVFPKGVDGKPTLIYTSVSSLPIHWSIPYNPGAESQSLAVSNDGSGRNFTKLDQPPVIPLPPSDLDVTAFRDPYAFQSQELDTAAKSNAGTWYTVISGGVHEKGPGQFLYRQSQANMSLDSWEYLGQWWHESVNGTWGNGDWAGGWGFNFETGNIFSLNEEGYSTDGEMFMTLGTEGSGTPIVSQVSSIHDMLWVAGNVSNNGNITFTPSMAGIFDWGASGYAASGNILSASSKASTKSGAPDRFISTVWLTGDLFEQAKGYPAAQQGWVGTLLLPRELRIKTISGVADNELARETGSSWRVRNSESAAGYLELETLGIDIARETREALFSGSKISEQERTLTEAGGVPFQVSPTTKYYALSAKLSFPRSARNSDLQAGFQVLSSNLESTTIYYQFSNESIIVDRSNTSAASKTTDGIVSANEAGRLRLFDLKGETEKIETLDLTIVVDNAVVEVYANGRFALGTWARYVLCQMQKAGIG

SEQ ID NO: 474 - protein, 671 aa, Unknown
  Description of Unknown: Aspergillus versicolor sequence
MKLPSSLDILLARQAVGGIEVDYNSPPPDLSTLPENSLFDTWRPKIHVLPPNGQIGDPCAHYNDPATGLFHVGFLHNGTGISSVYTDDLVTYRDINPNGGYIIVAGGPNDPLAVFDGSVIPSGIDDLPTLLYTSVTSLPIHWTLPYTLGSETQSLAVSDDGGHHFDKLDRGPVIPLPPDGLDVTAFRDPYVFQNHELDEVVGSDPDTWYATVSGGVHDVGPGIFLYRNQDPSFENWEYLGEWWQEPANSTWGDGTWAKRWGYNFETGNVFSLDREGYNVDGHTFITVGVEGAYAPIQPSVTSMHAMLWAAGNVSSENGESATFTPYMAGALDWGMAAYAGAGKVLPSTSQASEKSGAPDRFISWVWLTGDEFGAAAGFPGAQQGWQNTLLLPRELSIHTIPNVVDNELVHETASWRVVEHDGERKSGGVELETLGINIARETYDAIVASSTSFEEPPRDLNEAGTVPFERSPTSRFFALEAQISFPQSARDSEVQSGFQILASEFEWTTIYYQFSNESIVIDRNQTSAASETTPGLGTVTESGRIRLFDIAGDCDHDGHGGHDGGHEGDGDHNGGNHNGDGGDKDRARPQKQDGSCDKDHDKIETLDLTIVVDNSVLEVYANSRFVVSTWVRPWYANSTEIRFFHNGEGEVSFGNIAVHDGLYDAYPDRAN

SEQ ID NO: 475 - protein, 645 aa, Unknown
  Description of Unknown: Aspergillus coremiiformis sequence
MRLPTAAEVLIARQAAGAAGIDYNAPPPVLSTLPAGSLFETWRPKIHVLPPYGQIGDPCAHYNDPQTGLFHVGFLHNGTGISAVQTNDLVHYFDVNPNGNYTIVAGGANDPLAVFDGSVIPNGVGGEPTLLYTSVSHLPIHWTLPYTRGSESQSLAVTYDGGHNFTKLDRPPVIPVPPEGVDVTAFRDPYVFQNSDLDGTVGSSPGTWYATVSGGVHGVGPGIFLYRNQGPGFVNWEYLGEWWSEPANSTWGNGDWAKIWGYNFEVGNVFSLDESGYNVDGETFVTLGVEGSYAPIVAGATSMHAMLWASGSLSIPSGGNVTFEPTMAGVLDWGASGYAAAGKFLPATSQASQKSGAPDRFISYVWLSGDFFGGAAGFPGAQQSWQSALMLPRELKKQTISNVVNNDLVSETGSWRVEESSNSCAKLETMGIKIARETYKAMTSTPSFTEPKRKLSKSGTVPFGRSPATKYFVLNAQLSFPKSARTSGIQSGFKILGSNLESTTIYYQFSNESIVIDRSNTSAAALTTPLDTATESGRLRLFDLSKKCKSGDKSKGHEGSTEHRVKHNSMEADEDHIETLDLTIVVDNSILEVYANSRFALGTWVRPWYANSTGISFFHNGVGEVLFSNMTVYDGLYDAYPDRAT

SEQ ID NO: 476 - protein, 654 aa, Unknown
  Description of Unknown: Aspergillus saccharolyticus sequence
MKLTTTLTLATTATATATSYTLDTTLPPPTNLSALPNNTLFHLWRPRAHILPAKGQIGDPCAHYTDPTTGVFHIGYLHDGSGIAGATTSNLVTYTDVSANGSFLIQPGGKNDPVAVFDGSVIPTGVNNTPTLLYTSVSFLPIHWSIPYTRGSETQSLAVAVEGGMRFERLDQGPVIPDHPFAVDVTAFRDPFVFRSARLDVLLLSTTDTTNETAVQAAVDHWTEKGAPWYIVISGGVHGQGPVQFLYRQYHGNSSEFQYWEYLGEWWQEATNSSWGAEGGWAGGWGFNFETGNVAFLTEEGHDPQTGMVVVTLGTEGSDVPIVPQVSSRHDMLWAAGAVETRPEDGRVQFTPSMAGFVDCGFSAYAAAGKVLPATSQVSRGSGVEVDRFLSFVWLTGDQFEQAEGFPTAQQGWTGSLLLPRELTVRTVDHVVDNELVREEGVSWVVEWGESEHTTVTLRTLGIAIARETKAALLANGSVVDEAVRTMREASVVPFRQSPASKFFVLTAQLDFPAEARTSGLQSGFQILASGLEHTTIYYQFSNESLVIDRSQTSAAAPTNPGLDSFTESGRLRLFDVVDEEGGQQKIETLELTVVVDNAVLEVYANGRFALSTWARSWYANSTEIRFFHNGEGEVHFRNVSVSEGLYNAWPERK

SEQ ID NO: 477 - protein, 642 aa, Unknown
  Description of Unknown: Aspergillus terreus sequence
MKSSVTRMGLVASLVASAAAQDYNEPPPDLSTLPSGSLFETWRPKIHVLPPAGQIGDPCAHFPDPETGLFHVGFLHNGTGISAVQTADLVYYYDVNPGGGYTIVAGGANDPVAVFDGSVIPIGVDDKPTLFYTSVSSLPIHWTLPYTRGSESQSLAVTYDQGHSFTKLDQPPVIPEPPAGLDVTGFRDPYVFQSGPLDSTLDSADGTWYAVVSGGVHDVGPGVFLYRNENPDFDEWDYLGEWWQEPANSTWGDGYWAKRWGYNFETVNFLGLDEMGYNPDGETFATLGVEGAYAPIQPSVTSMHAQLWAAGSISTSDDGNVTFTPSMAGALDWGQAAYAGAGKVLPKDTQPSQQSGAPDRFISYIWLNQDEFGAATGFPDAQQGWHNALLLPRELSVKIIPDVVNNELVQEEEASWLVKDGSDGHCVELQTLGIDIARETYAAMTQTDSFTEDERTLADFAIIPFEQSPSSRFFVLEAQLSFPSSARDSELQSGFQILSSDEEYTTIYYQFSNESIIIDRSHTSAASETTSGMGTSPEAGRLRLFDICGEHCKCKHKKCSHHDGEKSDHHDEHMETLDLTIVVDNSMLEVYANSRFALSTWVRPWYSYSNEISFFHNGEEEVTFSNIRIFDGLYDAYPERER

SEQ ID NO: 478 - protein, 659 aa, Unknown
  Description of Unknown: Aspergillus alliaceus sequence
MRLPSVAEVLVARQAAGSAGIDYNAPPPVLSTLPSGSLFETWRPKIHVLPPNGQIGDPCAHYNDPATGSFHVGFLHNGTGISAVQTDDLVHYVDVNENGNYTIVAGGPNDPLAIFDGTVIPSGIDGKPTLLYTSVSSLPIHWTLPYVRGSESQSLAVTYDGGHNFTKLDRPPVIPVPPEGLDVTAFRDPYVFQNRDLDNTVGSSPGTWYATISGGVHDVGPGIFLYRSRGSDFEDWEYLGEWWSEPANSTWGNGDWAKVWGYNFETSNVFSLDGEGYNVNGETFITVGVEGSYAPITETVSSQHGMLWASGSISTPDGGNVTFKPTMAGVIDWGISAYAASGKVLPATSQASEKSGAPDRFIIYVWLNQVFGASTGFPDEQQGWKNTLLLPRELTKKTINVANNELVWDTGSWRVEKDGESCAKLETMGIDIARETYKAMKSTNSFKEPKRTLSSAGSVPFERSPTTKFFVLDAQISFPKPARESGVQAGFKILSSDHESTTVYYQFSNESIVIDRTNTSAAGLNNPGFDASAESGRLRLFDIRKHCNGGSSDHDDEYVGHGKGKEHDGHKAGSYGHHAKHSKSTADDEEIETLDLTIVVDNSVLEVYANSRFALATWARTWYANSTGISFFHNGVGEVSFSDISVSDGLYNAYPERTR

SEQ ID NO: 479 - protein, 403 aa, Unknown
  Description of Unknown: Aspergillus niger sequence
MAYRLSDSPPVLFMHYWEFLGQWWHEPTNSTWGNGTWAGRWAFNFETGNVFSLDEYGYNPHGQIFSTIGTEGSDQPVVPQLTSIHDMLWVSGNVSRNGSVSFTPNMAGFLDWGFSSYAAAGKVLPSTSLPSTKSGAPDRFISYVWLSGDLFEQAEGFPTNQQNWTGTLLLPRELRVLYIPNVVDNALARESGASWQVVSSDSSAGTVELQTLGISIARETKAALLSGTSFTESDRTLNSSGVVPFKRSPSEKFFVLSAQLSFPASARGSGLKSGFQILSSELESTTVYYQFSNESIIVDRSNTSAAARTTDGIDSSAEAGKLRLFDVLNGGEQAIETLDLTLVVDNSVLEIYANGRFALSTWVRSWYANSTNISFFQNGVGGVAFSNVTVSEGLYDAWPDRQS

SEQ ID NO: 480 - protein, 663 aa, Unknown
  Description of Unknown: Aspergillus chevalieri sequence
MKRPTTAKALAMSFGVAAAQDYNAPPPDLSTLPSLSLFDTWRPHIHVLPPAGQIGDPCAHYVDPETGLFHVGYLHNGTGIASVQTDDLVHYYDVNENGNYSIVAGGPNDPLAVFDGSVIPDGIDGEPTLLYTAVSSLPIHWTLPYTRGSEAQALAVTYDGGKNFTKLDIPPVIPEPPAGLDVTAFRDPYVFQNGKLDQALSSPEGTWYTAISGGVQDVGPGIFLYRNLSPDFEQWEYLGEWFNVPANSTWGNGDWSKVYGYNWETVNAFSLDREGYNYDGDTFVHFGVEGSFAPIQESVTSFHAMLWASGGVSATEDGNAAFNPDMVGVLDWGLSAYAGAGKVVPSTSQASTESGAPDRFLTYIWLTGDVFGGVVGFPAEQQGWQNTLLLPRELYIREIPNVVNNDLVQEIGSWRVAGDSGNCVELETLGIDIARETYAAITGAPSFEEPDRTLSEESVVPFEQSPESRFFSLEARLSFPASARDSALQSGFQILASEEESTTIYYQFSNESIIIDRYNTSAAAETTTGIDASPESGRLRLFDIDDSCARSAGNDDKDKAHHDHGHGGKPKHNKAPLPHGKEGKRQVGESSGEHIEALDLTITVDNSVLEVYANGRFALSTYVRPWYADSTGIRFFHNGEGEVSFSNIRVADGLYDAYPERAR

SEQ ID NO: 481 - protein, 622 aa, Unknown
  Description of Unknown: Penicillium rubens sequence
MKVTTTASVLASILAGATAQDYNAPPPDLSTLPELSLFDTWRPHTHVLPPHGQIGDPCGHYNDPETGLFHVGFLHNGTGIAMVLTDDLVHYYDVRPNGNYSIVAGGANDPLAVFDGSVIPSGVDGKPTLLYTSVSSLPIHWTLPYVRGSESQSLAVTYDGGENFTKLDIPPVIPEPPAGLEVTAFRDPYVFQNSALDQSLGSAPGTWYTIVSGGVKDVGPGMFLYQNTSPDFQQWEYLGEWYNEPANSTWGNGDWAKMFGYNFETSNVVGLTREGYSYNGDPFLTIAVESSYVPIQESVSSLHAMIWAAGAIANTDGENVTFTPDMVGVFDWGLAAYAAAGKVLPASSQASTASGAPDRFISYVWLTGDVFGGVVGFPAAQQGWQNTLLTARELYIRAIPNVVNNELAQETGSWRVADNGRSTGRCVELETLGIDIARETYGAMTSAPGFSEPDRTTTTAGVIPFGRSPESRFFVLEAEIDFNARASTLQAGFQILASEFESTTIYYQFSNESIVIDRSETSAAADTTTGIDASPESGRLRLFDINDRFGEDRIETLSLTIVVDNSVLEVYANNRFVVSTWVRPWYANSTEIRFFQNGEGEASFSNIRVADGLYDAYPERPQ

SEQ ID NO: 482 - protein, 664 aa, Unknown
  Description of Unknown: Aspergillus avenaceus sequence
MRLPSAAEVLAARQVISPGAIDYTAPPPDLTTLPEGSLFETWRPRIHVLPPNGQIGDPCAHYSDPATGLFHVGFLHNGTGIAAVYTDDLVHYRDVNPNGDYVIVAGGANDPLGVFDGSVIPSGVDGQPTLLYTSVSALPIHWTLPYTPGSETQSLAVTYNEGHNFTKLDLPPVIPSPAPDLDVTAFRDPFVFQNGRLDDAAGSTPGTWYATISGGIHDVGPGFFLYRNVGTGFTDWEYLGEWWQEPLNSTWGNGDWAKVFGYNWETGNAVSLDETGYNVNGETFLTFGVEGSYVPIQPSVSSVHAQLWAAGDVGRDSAGNVAFTPTMAGVLDWGSSAYAGAGKVIPSDSQASQRSGAPDRFLSYIWLTGDVFGGVTGFPSAQQSWQNSLLLPRELSVDRIFNVVNNELAQEADAWRVEDKGNGCAELVTLGINIARETLDAAKATVGWREDERTISTAGTVPFDRSPETRFFVLEAELSFPRSARNSGTQAGFQILASELESTTIFYQFSNESIIIDRSNTTAAGLTTSGFDASPESGRLRLFDLSNECGPSSDKGHASDKDKDSSKDKQSEGHSGSSKKKDGHRFSAENVETDEIETLALTIVVDNSILEVYANSRFALSTYVRPWYHNSTDIRFFHNGVGSVSFSDVNVYDGLYDAYPERDL

SEQ ID NO: 483 - protein, 630 aa, Unknown
  Description of Unknown: Aspergillus terreus sequence
MKRLTAAHVLAGSFGLVASQDYNAPPPNLTTLPALSLFETWRPHIHVLPASGHIGDPCAHYVDPDTGLFHVGFLHNNTGISSVYTDDLVHYYDVSDFIIVAGGRNDPVAVFDGSVIPRGLDGKPTLFYTSVTSLPIHWTIPYVWGSESQSLAVTSNGGKNFTKLDRTPVIPGPPRADVTGFRDPYVFQNGHLDKALNSSEDTWYAVISGGVRDVGPGIFLYRSISDDFQDWEYMGNWFNASVNSTLGNGPWPRVSGYNWETANVFSLDRTGYNQNADTFMTFGVEGSYVPIRKSVTSMHEMLWASGHVSAQGSNATFSADMIGVLDWGLSAYAAAGKVVPSTARVSQHGVPDRFISYVWLNGDGFEQIKGFPTAQQGWNNTLLLPRELRMLPISNVVYNELAQETGSWRVASDQNPAPGSCAELETLGINIARETYRAMTSVDGFSEPDRTITNQDREIIPFGTSPDAKFFVLEAQITFPQSARQSDLQAGFQVLASDLESTTIYYQFSNESIVIDRSNTSAAAKTTPGIDESLESGHLRLFDISDCCGGEGDRHTQCDSHVETLDLTIVVDNSVLEVYANSRFVMSTWARSWYANSTEIRFFHSGAGEVSFSNIHVREGLYDAYPGRRR

SEQ ID NO: 484 - protein, 661 aa, Unknown
  Description of Unknown: Penicillium griseofulvum sequence
MKVTTTTSVLATIWAGVSAQDYNAPPPNLADLPELSLFETWRPHTHVLPPHGQIGDPCAHYNDPETGLFHVGFLHNGTGIAQVLTDDLVHYYDVNPNGNYSIVAGGPNDPLAVFDGSVIPSGVDGKPTLLYTSVSSLPIHWTLPYTRGSESQSLAVTYDGGKNFTKLQIPPVIPEPPVGLDVTAFRDPYVFQNAELDRSLGNPAGVWYTIISGGVRNVGPGMFLYQNTSPNFEQWEYLGEWYHEPANSTWGNGDWSRVFGYNFETSNVFGLTREGYSYNGEPFMTIAVESSYAPIQESVSSQHAMIWTAGSISTPRGENVTFAPEMVGVFDWGLASYAAAGKVLPRSSQASTASGAPDRFISYVWLTGDVFGGVVGFPAAQQGWQNTLLTARELYIKAIPNVVNNALVQETGSWRVAANSNSRGNCVELETLGIDIARETYAAMTATRRFTEPDRTTTSEGVIPFRRSPNSRFFILEAEIDFDTRASGLQAGFQILASDLESTNIYYQFSNESIMIDRSQTSAAADTTSGIDASPESGRIRLFDINENCGANGDNGANGGHNGGHWGGHKGRPFDFSSFGFPSPPNGVGRQHIETLNLTIVVDNSVLEVYANSRFVLSTWVRPWYANSTEIRFFQNGQGTASYSNIRFSDGLYDAYPDRPQ

SEQ ID NO: 485 - protein, 858 aa, Unknown
  Description of Unknown: Aspergillus terreus sequence
MKRLTAAHVLAGSFGLVASQDYNAPPPNLTTLPALSLFETWRPHIHVLPASGHIGDPCAHYVDPDTGLFHVGFLHNNTGISSVYTDDLVHYYDVSDFIIVAGGRNDPVAVFDGSVIPRGIDGKPTLFYTSVTSLPIHWTIPYVWGSESQSLAVTSNGGKNFTKLDRPPVIPGPPRADVTGFRDPYVFQNGHLDKALNSSEDTWYAVISGGVRDVGPGIFLYRSISDDFQDWEYLGNWFNASVNSTLGNGPWPRVSGYNWETANVFSLDRTGYNQNADTFMTFGVEGSYVPIRKSVTSMHEMLWASGHVSAQGSNATFSADMIGVLDWGLSAYAAAGKVVPSTARVSQHGVPDRFISYVWLNGDGFEQIKGFPTAQQGWNNTLLLPRELRMLPISNVVYNELAQETGAWRVASNQNPAPGSCTELETLGIDIARETYRAMTSVDGFSEPDRTIKNQDRQIIPFGTSPGAKFFVLEAQITFPQSARQSDLQAGFQVLASELESTTIYYQFSNESIVIDRSNTSAAAKTTPGIDESLESGHLRLFDISDCCGGEGNGHTQCDSHVETLDLTIVVDNSVLEVYANSRFVMSTWARSWYANSTEIRFFHSGPTQPPNLGLEARKGGHYIELVIKRTHIAGPSVYANKQNKQNKQNKQNKQNKQNKQNKQNKQNKQNKQNKQNKQNKQNKQNKQNKQNKQNKQNKQNKQNKQNKQNKQNKQNKQNKQNKQNKQNKQNKQNKQNKQNKQNKQNKQNKQNKQNKQNKQNKQNKQKSRKAEKQKSRKAEKRKSRKAEKQKSRKAEKQKSRKAEKQKSRKAEKQKSRKAEKQKSRKAEKQKSRKAEKQKSRKAEKKKRRNEEKKKRRK

SEQ ID NO: 486 - protein, 668 aa, Unknown
  Description of Unknown: Penicillium roqueforti sequence
MNIIKVAAVLISISAGATAQDYNAPPPNLADLPPLSLFETWRPHTHVLPPNGQIGDPCAHYNDPETGLFHVGFLHNGTGIAGVLTDDLVHFYDVNPNGGYSIVAGGPNDPLAVFDGSVIPSGVDGEPTLLYTSVSALPIHWTLPYIRGSESQSLAVTYDGGQNFSKLEIPPVIPEPPEGLDVTAFRDPFVFQNGPLDEILGNTDGTWYTIVSGGVKEIGPGLFLYQNTSPDFEQWEYLGEWYHEPANSTWGNGDWSKVFGYNFETSNVFGLDREGYSHNGSPFMTIAVESSYVPIQPSISSLHAQLWAAGSISIPEGENVTFVPDMVGVLDWGLAAYAAAGKVLPASSQASTASGAPDRFISYVWLTGDVFGGVVGFPSEQQGWQNTLLTSRELYIKAIPNVVNNRLVNEIGSWRLAASSPSTGKCVKLETLGIDIAREPYNAMKAAPSFTEPDQTLTSSGIIPFGRSPETKFFILEAEIDFLARSSDLQAGFQILASDLESTTVYYQFSNESIMIDRSETSAAANTTTGIDKSPESGRLRLFDINDCCGADCGHCGHGGHGCGHKGKHGEPYSTKCKSEISSESHAHNSSSNGVCEDRIETLSLTILVDNSVLEVYANSRFVLSTWVRPWYQNSTGIRFFQNGEGEVSFSNIRVADGLYDAYPDRSQ

SEQ ID NO: 487 - protein, 682 aa, Unknown
  Description of Unknown: Penicillium freii sequence
MKATTAASVLALIWEGATAQDYNAAPPDLATLPALSLFETWRPHTHVLPPDGQIGDPCAHYTDPETGSFHVGFLHNGTGIAAVLTNDLVHYYDVRPNGNYSIVAGGPNDPLAVFDGSVIPSGVDGKPTLLYTSVSALPIHWTLPYTRGSESQSLAVTYDGGKNFTKLDIPPVIPEPPADVDVTGFRDPFVFQNAELDQTLGSAEGTWYTIISGGVRDVGPGLFLYQNTSPDFEQWEYLGEWYREPANSTWGNGDWSKTFGYNFETSNVFGLTREGYSYNGSPFLTIAVESSYEPIQDSVSSLHAQIWAAGSFGIPEGGNVTFSPDMVGVYDWGLASYAAAGKVVPASSQASTASGAPDRFISYVWLTGDVFGGVVGFPAEQQGWQNTLLTARELYIKTIPNVVNNDLVKETASWRVAANSDSAGQCVELETLGIDIARETYDAMTAVPSFTEPDQTITSAGVTPFTRSPESRFFIMEAEISFNTRASDLQAGFQILANEFESTTIYYQFSNESIMIDRSQTSAAGDTTTGIDASPESGRLRLFDINDSCGNNGGNGGHGGSGGHGGQGGYAGNGDHNCGGKGEKGEHHSTNCKSDPASGSDAHTSHSTQVGEHIETLSLTVVVDNSVLEVYANSRFVLSTWVRPWYQNSTEIRFFKNGEGEASFSNIHVADGLYDAYPDRDQ

SEQ ID NO: 488 - protein, 593 aa, Unknown
  Description of Unknown: Aspergillus flavus sequence
MEAKIHVLPPTGRIGDPCAHYNDPETGWFHVQCLYNGTGIAGVQTDDLVYYLDINENGNYTIVAGGANDPLAVFDGSVIPSGIDDKPTLLYTSVSHLPIHWTLPYTRGSESQSLAVTYGGGHNFKKLDRRPNKDLDDTVGSSSGTWYAAISGGVHDVGPGVFLYRNQGSGYEDWEYLGKWWSEPVNSTCGNGDWAKAWGYNFEVGNVFSLDKEGYYVNGETFITLGVEGSYVPITESVTSMHGMLWASGNILKPDGGNVTFEPTMAGVLDWGISSYAAAGKVLPATSQASEKSGAPDRFISYVWLTGDVFGGVAGYPSEQQGWQNTLLLPRELHKQTISNVVDNDLASETGSWCVKDSENSCLKLETMGIKIARETYKAMINKTSFTEPKRTLSEDGAVPFKQSPTTKFFVLNAQLSFPKSARDPGVQAGFKILSSELESTTIYYQFSNESIVIGRSNTSAAVQTTTEIDTTTESGRLRLFDINKNCNKSDDDGKQEERKKKDAYREHGRNRHNVKLAAEDESHIETLDLTIVVDNAVLEVYANSRFALSNWARTWYANSTEISFFHNGEGEVTFSDISVSDGLYDAYPDRAR

SEQ ID NO: 489 - protein, 733 aa, Unknown
  Description of Unknown: Penicillium nalgiovense sequence
MKATTTASVLASILAGATAQDYNAAPPDLSTLPELSLFDTWRPHTHVLPPHGQIGDPCAHYNDPETGLFHVGFLHNGTGIAMVLTDDLVHYYDVRPNGNYSIVAGGANDPLAVFDGSVIPSGVDGKPTLLYTSVSSLPIHWTLPYVRGSESQSLAVTYDGGENFTKLDIPPVIPEPPAGLEVTAFRDPFVFQNSALDESLGSAQGTWYTIVSGGVKDVGPGMFLYQNTSPDFEQWEYLGEWYNEPANSTWGNGDWSKMFGYNFETSNVVGLTREGYSYNGEPFMTIAVESSYVPIQESVSSLHAMIWAAGAIANTDGDNVTFTPDMVGVFDWGLAAYAAAGKVLPASSQASSASGAPDRFISYVWLTGDVFGGVVGFPAAQQGWQNTLLTARELYISAIPNVVNNELAQETGSWRVADNGGSTGRCVELETLGIDIARETYDAMTSAPGFSEPDRTTTSAGVIPFGRSPESRFFVLEAEIDFNARASTLQAGFQILASEFESTTIYYQFSNESIMIDRSETSAAADTTSGIDASPESGRLRLFDINDSCGNEGGNGGHGGHGGHPGLDGIDGLGALGGEFGHKGEHGSSDNKPNTAWGSNAQTSESGGVGQDHIETLSLTVVVDNSVLEVYANNRFVVSTWVRPWYANSTEIRFFQNGEGEASFSNIRVADGFQTAIHQTALTDDTSRILFILDALEPLTDDVLAQAADELDSALKRLSPEVQTARRVIGPSP

SEQ ID NO: 490 - protein, 803 aa, Unknown
  Description of Unknown: Aspergillus arachidicola sequence
MILTSPVLLSHSYYLVALHSCLAKDQVLPKSMRLSWSVMGYWGGILLMGIVYRLWASSRYVQGGGDRGDVERKREQQLSDKAGIRNRLSFYWKAYIAVPAALGSYHQRRFLGCSIPNRPEILVVVGFWIMCIILNFGFHDIFIPNVTMPTISQQAWKYVAQRTSMFAYACLLWVWLFAGRNNIFIWVTGWSFSTFNVFHRHLSRLTAIFAFVHAISYTVLDTIYGPYYEEGLHVLWFKFGIIRYSSAAGAVAIDYNAAPSDLTTLPSGSLFETWRPKIHVLPPTGRIGDPCAHYNDPKTGWFHVQYLYNGTGIAGVQTDDLVYYYDINENGNYTGVAGGANDPLAVFDGSVISRGIDDKPTLLYTSVSHLPIHWTLPYTRGSESQSLAGFYVTAFRDPYVFQNKDLYDTVGSSSGTWYAVISGGVHDWSEPANSTWGNGNWAKVWGYNFEVGNVFSLDKEGYNVNGETFITLGVEGSYVPITESVTSMHRMLWASGNISKPDGGNVTFEPTMAGVLDWGTSSYTAAGKVLPATSRASEKSSAPDRFISRDGKIRYCSVLPRKLSKQTISNVVNNDLASETGLWRVEGSENSCLKLETMGIKIARETYKAMTNKTSFTEPKRTLSEAGAVPFEQSPTPKFFVLNAQLSFSKSARDSGVQAGFKILSSELESTTIYYQFSNEPIVIDRSNTSAAAQTATGTDTATESGRLRLFDINKNCKDDNKDKSDDDNKQEERKKKDAYREHGRNRHNVKHNAFAAEDESQIEILDLTIVVDNAVLEVYNVMLVYVNEHMMDGNVIELGKES

SEQ ID NO: 491 - protein, 458 aa, Unknown
  Description of Unknown: Aspergillus flavus sequence
MGIDVTAFRDPYVFQNKDLDDTVGSSSGTWYAAISGGVHDVGPGVFLYRNQGSGYEDWEYLGKWWSEPVNSTCGNGDWAKAWGYNFEVGNVFSLDKEGYNVNGETFITLGVEGSYGPITESVTSMHGMLWASGNILKPDGGNVTFEPTMAGVLDWGISSYAAAGKVLPATSQASEKSGAPDRFISYVWLTGDVFGGVAGYPSEQQGWQNTLLLPRELHKQTISNVVDNDLASETGSWCVKDSENSCLKLETMGIKIARETYKAMTNKTSFTEPKRTFCEDGAVPFKQSPTTKFFVLNAQLSFPKSARDPGVQAGFKILSSELESTTIYYQFSNESIVIGRRRLRLFDINKNCNKSDDDDKQEERKKKDAYREHGRNRHNVKLAAEDESHIETLDLTIVVDNAVLEVYANSRFALSTWARTWYANSTEISFFHNGEGEVTFSDISVSDGLYDAYPDRAR

SEQ ID NO: 492 - protein, 1005 aa, Unknown
  Description of Unknown: Aspergillus oryzae sequence
MSKEEVVEEMWSASENNSYQTKLEYGIVLAFIGRLTLPIPNRPEILVVVWFWIMCIILNFGFHDIFIPNVTMPTISRQAWKYVAQRTSMFAYACLPWVWLFAGRNNIFIWATGWSFSTFNVFHRHLSRLTAIFAFVHAISYTVLDTIYGPYYEEGLHVLWFKFGIIGATMMGLLCGLSIPYIRTKCYELFLVGHILFAVILLVALFQHTSVFGTKYNAYLWPVVAIWCCDRFLRLVRLVYCNIRVSTPGHLQTTTAMVTYSEEADVVRLDVQADGSIRPLPGHYFHLYQLFSWRGWENHPFTVGAYTAPNPTSPLTSSSNAQQGPHYMTGALNEKNPFTSTPTEVFTQGSQSSTTDPALGNLVFWIRPYNGWTKRLKDQCLRSSSSDDSAVNGYYQTSIPISLEGPYGHTLPLHHYGTVVMIVGGTGIATAVPYIHDHVSRLSKAGSRVSDDTKTQTSNLTLVWACRGHVFMQQLCGRELAGALEIEGFTGRFHCTKGCNSHCAADNKNGELRIERGRPNIENIIHGAATEAQIARHKMAGVDVTAFRDPYVFQNKDLDDTVGSSSGTWYAAISGGVHDVGPGVFLYRNQGSGYEDWEYLGKWWSEPVNSTCGNGDWAKAWGYNFEVGNVFSLDKEGYNVNGETFITLGVEGSYGPITESVTSMHGMLWASGNILKPDGGNVTFEPTMAGVLDWGISSYAAAGKVLPATSQASEKSGAPDRFISYVWLTGDVFGGVAGYPSEQQGWQNTLLLPRELHKQTISNVVDNDLASETGSWCVKDSENSCLKLETMGIKIARETYKAMTNKTSFTEPKRTFCEDGAVPFKQSPTTKFFVLNAQLSFPKSARDPGVQAGFKILSSELESTTIYYQFSNESIVIGRSNTSAAVQTTTEIEHYYRNCNKSDDDDKQEERKKKDAYREHGRNRHNVKLAAEDESHIETLDLTIVVDNAVLEVYANSRFALSTWARTWYANSTEISFFHNGEGEVTFSDISVSDGLYDAYPDRAR

SEQ ID NO: 493 - protein, 1285 aa, Unknown
  Description of Unknown: Aspergillus flavus sequence
MHLYVITLVAFTGLVHCWGGLSASSLDEYCFYSIYQSLSTLTWSGPHSQNAACNNTVQVSSIYTSVKLYCSDEELSAGVNLWENYCQGLYSPLDLDAMPNNTTSAYIAELPHVDPSQYQKMILTSPVLLSRSYYLVALHSYLAKDQALPKSTRLSWSVMGYWGRILLTGILHRLWTLSRHVQGGSGRGDVERKREQQLPDKAGIRDRLSFSWKAYIAVPAALGSYHQRRLLGCSIPNRPEILVVVWFWIMCIILNFGFHDIFIPNVTMPTISRQAWKYVAQRTSMFAYACLPWVWLFAGRNNIFIWATGWSFSTFNVFHRHLSRLTAIFAFVHAISYTVLDTIYGPYYEEGLHVLWFKFGIIGAIMMGLLCGLSIPYIRTKCYELFLVGHILFAVILLVALFQCVLLCSLPVYDFGRCETGLQDKTDILPFSELNITPTSGQWLPYGAVIGSCASYASEEADVVRLDVQADGSIRPLPGHYFHLYQLFSWRGWENHPFTVGAYTAPNPTSPLTSSSNAQQGPHYMTGALNEKNPFTSTPTEVFTQGSQSSTTDPALGNLVFWIRPYNGWTKRLKDQCLRSSSSDDSAVNGYYQTSIPISLEGPYGHTLPLHHYGTVVMIVGGTGIATAVPYIHDHVSRLSKAGSRVSDDTKTQTSNLTLVWACRGHVFMQQLCGRELAGALEIEGFTGRFHCTKGCNSHCAADNKNGELRIERGRPNIENIIHGAATEAQIARHKMAVLTCGSPHMSDEVRRSVHRILKKGYEGIEYFEEAYSWLSWPSHSFVAKLHLCYGLKITIPKLTLSFGWYAPLGIDVTAFRDPYVFQNKDLDDTVGSSSGTWYAAISGGVHDVGPGVFLYRNQGSGYEDWEYLGKWWSEPVNSTCGNGDWAKAWGYNFEVGNVFSLDKEGYYVNGETFITLGVEGSYVPITESVTSMHGMLWASGNILKPDGGNVTFEPTMAGVLDWGISSYAAAGKVLPATSQASEKSGAPDRFISYVWLTGDVFGGVAGYPSEQQGWQNTLLLPRELHKQTISNVVDNDLASETGSWCVKDSENSCLKLETMGIKIARETYKAMTNKTSFTEPKRTLSEAGAVPFKQSPTTKFFVLNAQLSFPKSARDPGVQAGFKILSSELESTTIYYQFSNESIVIGRSNTSAAVQTTTEIDTTTESGRLRLFDINKNCNKSDDDGKQEERKKKDAYREHGRNRHNVKLAAEDESHIETLDLTIVVDNAVLEVYANSRFALSNWARTWYANSTEISFFHNGEGEVTFSDISVSDGLYDAYPDRAR

SEQ ID NO: 494 - protein, 1257 aa, Unknown
  Description of Unknown: Aspergillus novoparasiticus sequence
MHLYIITLVAFTGLVHCWGGLSASSLDEYCFYSIYESLSTLTWSGPYSQNAACNNLVQVSSVYTSAKLYCSDEELSAGVNLWENYCQGLYSPLDLDAIPNNTTSAYIAELPHVDPSQYHKMILTSPVLLSHSYYLVALHSYLAKDQALPKSTRLSWSVMGYWGGILLMGILHRLWASSRHVQGGSDRGDVERKREQQLPGKAGIRNRLSFYWKAYIAVPAALGSYHQRRFLGCSIPDRPEILVVVGFWIMCIILNFGFHDIFIPNVTMPTISQQAWKYVAQRTSMFAYACLPWVWLFAGRNNIFIWATGWSFSTFNVFHRHLSRLTAIFAFVHAISYTVLDTIYGPYYEEGLHVLWFKFGIIGAIMMGLLCGLSVPYIRTKCYELFLVGHILFAVILLVAVFQHTSVFGTKYNAYLWPVVAIWCFDRFLRIVRLVYCNIRVSTHGRLQRTTAMATYSKEADVIRLDIQAGGSIRPLPGHYFHLYQLFSWRGWENHPFTVGAYTAPSPTSPLTSSSNTQQGPHYMTGALNEKNPFISTTTEIFTQGTQSSTTDPALGNLAFWIRPYNGWTKRLKDQCLSSSSSDDSAENGCYQTSITISLEGPYGHTLPLHQYGTVLMMVGGTGIATAVSYIHDHVSRLSKTGSRVSGDTKSQTSNLTLVWACRGHEFMEQLCGRELAGALELEGFTGRFHCTKGCNSHCAADDKNGELRIERGRPNIENIIHGAATEAQIARHKMAVLTCGSPHMSDEAAGAVAIDYNAAPPDLTTLPSGSLFEIWRPKIHVLPQLVGSVTHVRITTIPRPGGSMFSTCINGTGIAGVQTDDLVYYYDINENGNYTIVAGGANDPLAVFDGSVIPSGIDDKPTLLYTSVSHLPIHWTLPYTRGSESQSLTVTYDGGHNFTKLDRPPVIPEPPEGLDVTAFRDPYVFQNKDLDDTVCSSSGTWYAVISGGVHDVRPGAFLYRNQGSGYEDWEYLGKWWSEPANSTWGNGDWAKVWGYNFEVGNVFSLDKEGYNVNGGTFITLGVEGSYVPITESVTSMHGMLWASGNISKPDGGIVNFEPTMAGVLDWGTSSYAAAGKVLPATFQASEKSGAPDRFISYVWLTGDVFGGVTGFPNVLHRAEAHEAGAVPFEQSPTPKFFVLNAQLSFSRSARDSGVQAGFKILSSELESTIIYYQFSNESIVIDRSTTSAAAQTTTGIDTATESGRLRLFDINKNCKDDNKDKSDDDDKQEERKKKDAYREHGRNRHNVKHNAFACRG

SEQ ID NO: 495 - protein, 478 aa, Unknown
  Description of Unknown: Aspergillus tamarii sequence
MRPPSAIDQPSLFDTWRPKIHVLPPSAQIGDPCAHYNDLETGWFHVLYLHNGTGIAANGPLAVFDGSIIPSGMDDKPTLLYTSVSHLPIHWTLPYTRRSEPHSLAVTYDEGLDVTAFRDPYIFQNKDLDDTVGSSPGAWYATISRGVHDGSGYEDWEHLRVWWSESANSTWGNVGNVFSLDKEGYNVNGETFITFGVEGSYVPITESGTSMHGMLWASGPITIPDGGNVAFEPTMAGVLDWGTFSYAATGKVLPATSQASEKGGAPVHFISYNTLLLPLDNDLAWQTGSWRVEDSEKSCLKLETMGIKIARETYKAMTSTTSFAEPKRTLSDAAVVLSKHPLVTGIQAGFTILSSELESTTIYYQFSNEYIVIDRSNTNTAAQATTGIATATKSGRLRLFDINKHCKDDSKDGKGESHIETLDLTIVVDNEVLEVHANSPFALSTWARALFHDGKGEVTFSDVSVFDGLYNTYPNRVR

SEQ ID NO: 496 - protein, 430 aa, Unknown
  Description of Unknown: Aspergillus bombycis sequence
MLNTVCSLHPYQKEIVAYSVNAKDMRLRPCTTGSGYEDWEYLGEWCSEPANSTWGNGDWAKVWGYNFEVGNVFSLDKEGYDVNGETFITLRVEGSYVPITESVTSMQGMLWAPGAISIPDGGNVTFEPTMAGVLDWGSSSYAAAGNVLPATSQASEKSGAPDHFISYVWLTGDVFGGVAGSPSDQQGWQNPLLLPRELNKHTISNVVDNDLAWETGSWRVDDSEKSCLKLETMGIKIARETYKAMTNTTALQRAEAHVERCLSARDSGVQAGFKILPSELESTTIYYRFSNESIVIDRSNTSAAAQPTTGIDTATESGRLRLFDISKHCKDDSKDEGDDREHGRNCHIAKRNAFAAEDESHIETLDLTVVVDNAVLEVYANSRFALSTWARTWYANSTEISFFHNGEGEVTFSDISVSDGLYDAYPDRAR

SEQ ID NO: 497 - protein, 1251 aa, Unknown
  Description of Unknown: Aspergillus sergii sequence
MHLYIITLVAFTGFVHCWGGLSASSLDEYCFYSIYESLSTLTWSGPYSQNAACNNLVQVSSIYASAKLYCSDEELSAGVNLWENYCQGLYSPLDFDATPNNITSAYIAELPHVDPSQYHKMILTSPVLLSHSYYLVALHSYLAKDQALPKSTRLSWSVMGYWGGILLMGILHRLWASSRHVQGGSDRDVERKREQQLSDKAGIRNRLSFYWKAYIAVPAALGSYHQRRFLGCSIPNRPGILVVVGFWIMCIILNFGFHDIFIPNVTMPTISQQAWKYVAQRTSMFAYACLPWVWLFAGRNNIFIWATGWSFSTFNIFHRHLSRLTAIFSFVHAISYTVLDTIYGPYYEEGLHVLWFKFGIVGAIMMGLLCGLSIPYIRTKCYELFLVGHILFAVILLVAVFQHTSVFGTKYNAYLWPVVAIWCFDRFLRIVRLVYCNIRVSTHGRLQTTTAMATYSKEADVIRLDIQAGGSVRPLPGHYFHIYQLFSWRGWENHPFTVGAYTAPSPTSPLTSSSNTQQGPHYMTGALNEKNPFTSTTAEIFTRGTQPSTTDPALGNLVFWIRPYNGWTKRLKDQCLSLSSSDDSAENEFYQTSIPISLEGPYGHTLPLHQYGTVFMIVGGTGIATAVPYIHDHVSRLSKTGSRASDDSKTQTSNLTLVWACRGHEFMEQLCGRELTGALELEGFTGRFHCTKGCNSHCAADDKNGKLRIERGRPNIENIIHGAATEAQIARHKMAVLTCGSPDMSDKVRRSVHSILKKGYEGIEYFEEAYSCGALFETWRPKIHVLPPTGRIGDPCAHYNDPETGWFHVQYLYNGTGIAGVQTHDLVYYYDINENGNYTIVAGGANDPLAVFDGSVIHSGIDDKPTLLYTSVSHLPIHWTLPYTRGTGPPPPVIPEPPEGLDVTAFSDPYVFQNKDLDDTVGSSSGTWYAVISGGVHNGSGYEDWEYLGEWWSEPANSTWGNGDWAKVWEYNFEVGNVFSHDKEGYNVNGETFIILGVEGSYVSITESVTSMHGMLWASGKISKPDGGNVTFEPTMAGVLDWGTSSYAAAGKVLPATSQASEKSGAPDRFISYVWLTGDVFGGAAGFPSEQQAWQNTLLLPRELSKQTISNVVDNDLCLGDWLVACGSAAAQTTTGIDTATEPGRLRLFDINKNCKDDNKDKSDDDVKQEERKKKDAYREYGRNRHNVKHNAFAAEDEAHIETLDLTIVVDNAVLEVYANSRFALFSWARTWYAESTEISFFRNGEGEVTF

SEQ ID NO: 498 - protein, 185 aa, Unknown
  Description of Unknown: Aspergillus niger sequence
MKLQTASVLLGSAAAASPSMQTRASVVIDYNVAPPNLSTLPNGSLFETWRPRAHVLPPNGQIGDPCLHYTDPSTGLFHVGFLHDGSGISSATTDDLATYKDLNQGNQVIVPGGINDPVAVFDGSVIPSGINGLPTLLYTSVSFLPIHWSIPYTRGSETQSLAVSSDGGSNFTKLDQGPVIPGPPF

SEQ ID NO: 499 - protein, 185 aa, Unknown
  Description of Unknown: Aspergillus niger sequence
GDLFEQAEGFPTNQQNWTGTLLLPRELRVLYIPNVVDNALARESGASWQVVSSDSSAGTVELQTLGISIARETKAALLSGTSFTESGRTLNSSGVVPFKRSPSEKFFVLSAQLSFPASARGSGLKSGFQILSSEHESTTVYYQFSNESIIVDRSNTSAAARTTDGIDSSAEAGKLRLFDVLNGGE

SEQ ID NO: 500 - protein, 1040 aa, Unknown
  Description of Unknown: Aspergillus minisclerotigenes sequence
MHLYIITLVAFTGLVHCWGGLSASSLDEYCFYSIYQSLSTLTWSGPHSQNAACNNPVQVSSIYTSAELYCSDEELSAGLAKDQALPKSTRLSWSVMGYWGGILLIGILHRLWTSSRHVQGGSGRGDVERKREQQLPDKAGIRGRLSFYWKAYIAVPAALGSYHQRRLLGCSIPNRPEILVVVGFWIMCIILNFGFHDIFIPNVTMPTISQQAWKYVAQRTSMFAYACLPWVWLFAGRNNIFIWATGWSFSTFNVFHRHLSRLTAIFAFVHAISYTVLDTIYGPYYEEGLHVLWFKFGIIGAIMMGLLCGLSIFYIRTKCYELFLVGHILFAVILLVALFQCVLLCSLPVYDFGRCETGLQDKTDILPFSELNITPTSGQWLPYGAVIGSCASYASYIATSASLPLDICKQLQQCWRGWENHPFTVGAYTAPNPTSPITSSSNAQQGPHYMTGALKEKNPFTSTTTEIFTQETRSSTTDSALGNLVFWIRPYNGWTKRLKDQCLSLSSSDDSAVNGCYQTSIPISLEGPYGHTLPLHHYGTVVMIVGGTGIATAVPYIHDHVSRSSKTGSRVSDDTKTQTSNLTLVWTCRGHVFMEQLCGRELAGALEIEGFTGRFHCTKGCNSHCAADNKNGELRIERGRPNIENIIHGAATEAQIARHKMAVLTCGSPHMSDEEVDAVICLYLGEWWSEPANSTWGNGDWAKVWGYNFEVGNVFSLDKEGYNVNGETFITLGVEGSYVPVTESVTSMHGMLWASGNILKPDGGNVTFEPTMAGVLDWGTSSYAAAGKVLPATSQASEKSGAPDCFISYRTGSWRVENSENSCLRLETMGIKIARETYKAMTNKTSFTEPKRTLSEAGAVPFEQSPTTKFFVLNAQLSLPKSARDSGVQAGFKILSSELESTTIYYQFSNESIIIDRRRLRLFDINKNCKDDSKDTSDGDDKQEERKKKDAYREHGRDRHNVKLAAEDESHIETLDLTIVVANAVLEVYANSRFALSTWARTWYANSTEISFFHNGEGEVTFSDIGVSDGLYDAYPDRAR

SEQ ID NO: 501 - protein, 223 aa, Unknown
  Description of Unknown: Aspergillus heteromorphus sequence
VVDNALSREAETSWRVSSTDAASGTVTLRTLGISIARETKSKLFSGSGSTSTERDRTLTSAGVTPFSRSPESKFFVLSARISFPSSARDSALQSGFQILSSDEEHTSIYYQFSNESIVVDRSKTSAASRTTEGIDSATEAGKLRLFDLQKDGEDVLESLDLTIVVDNSILEVYANGRFALSTWVRSWYANSTEIRFVHNGVGEATFENVTVSEGLYDAWPDRK

SEQ ID NO: 502 - protein, 965 aa, Unknown
  Description of Unknown: Aspergillus arachidicola sequence
MGFIAVCPRRSFYWKAYIAVPAALGSYHQRRFLGCSIPNRPEILVVVGFWIMCIILNFGFHDIFIPNVTMPTISQQAWKYVAQRTSMFAYACLPWVWLFAGRNNIFIWVTGWSFSTFNVFHRHLSRLTAIFAFVHAISYTVLDTIYGPYYEEGLHVLWFKFGIIGAIMMGLLCGLSIPYIRTKYYELFLVGHIPFAVILLVAVFQCVLLCSLPVHNLGRCETGLQEIIDILPFSELNITPTSDQWLPYGALIGFCASYASKEADVIRLDIQAGGSIRPLPGHYFHLYQLFGWHGWENHPFIVGAYTAPSPTSLLTSSSNTQQGPHYMTGALNEMNPFISTTTEIFTQGTQSSTTDPALGNLAFWIRPYNGWTKRLKDQCLSSSSSDDSAENGCYRTSIPISLEGPYGHTLPLHHYGTVLKIVGGTGIATAVSYIHDHGSRLSKTGSRVSGDTKTQTSNLTLVWACRGHEFKEQLCGRELTGALELEGFTGRFHCTKGCNSHCAADDKNGELRIERGRPNIENIIHGAATEAQIARHKMSVLTCGSPPMSYEVRRNVHSILKKGYEGIEYFEEANSCELTLSFGWYAPLFRGFYVTAFRDPYVFQNKDLYDTVGSSSGTWYAVISGGVHDVGPGIEPANSTWGNGNWAKVWGYNFEVGNVFSLDKEGYNVNGETFITLGVEGSYVPITESVTSMHRMLWASGNISKPDGGNVTFEPTMAGVLDWGTSSYTAAGKVLPATSRASEKSSAPDRFISYVWLTGDVFGGVTGFPMLPRKLSKQTISNVVNNDLASETGLWRVEGSENSCLKLETMGIKIARETYKAMTNKTSFTEPKRTLSEAGAVPFEQSPTPKFFVLNAQLSFSKSARDSGVQAATGTDTATESGRLRLFDINKNCKDDNKDKSDDDNKQEERKKKDAYREHGRNRHNVKHNAFAAEDESQIEILDLTIVVDNAVLEVYNRRLGDQFG

SEQ ID NO: 503 - protein, 1024 aa, Unknown
  Description of Unknown: Aspergillus transmontanensis sequence
MHLCIITLVAFTGLVHCWGGLSASSLDEYCFYSIYESLSTLTWSGPYSQNAACNNLVQVSSIYTSTKLYCSDEELYAGLAKDQALPKSTRLSWSVMGYWGGILLVGILHRLWASSQHVLQGGDRGDVERKREQQLSDKAGIRNRLSFYWKAYIAVPAALGSYHQRRFLGCSIPNRPEILVVVGFWIMCIILNFGFHDIFIPNVTMPTISQQAWKYVAQRTSMFAYACLPWVWLFAGRNNIFIWATGWSFSTFNVFHRHLSRLTAIFAFVHAISYTVLDTIYGPYYEEGLHVLWFKFGIIGAIMMGLLCGLSIPYIRTKCYELFLVGHILFAVILLVAVFQCVLLCSLPVHDFGRCEAGLQEITDILPFSELSITPISGQWLPYGALIGSCASYASYIATSASLPMDVCKEPQQCWRGWENHPFTVGAYTAPSPTSPLTSSSNTQQGPHYMTGALNEKNPFISTTTEIFTQGTQSSTTDPALGTLAFWIRPYNGWTKRLKDQCLSSLSSDDSAENGCYQTSIPISLEGPYGHTLPLHHYGTVLMIVGGTGIATAVSYIHDHVSRLSKTGSRVSGDTKTQTSNLTLVWACRGHEFMEQLCGRELAGALELEGFTGRFHCTKGCNSHCAADDKNGELRIERGRPNIENIIHGAATEAQIARHKMAVLTCGSPHMSDEVRRIDAVIWLGLDVTAFRDPYVFQNKDLDDTVGSGSGTWYAVISGGVHDVEPVCFSIETRDRDMRIGSTLENGGVSLLTRPGATVTGLNVWGYNFETFITLGVEGSYVPITESVTSMHGMLWASGNISKPDGGNVTFEPTMAGVLDWGPFSYAAAGKVLPATSQASEKSGAPDRFISYVWLTGDVFGGVTGFPSEQQGWQNTLLLSAPPFRETYKAMTNKTSFTEPKRTLSEAGAVPFEQSPTPKFFVLNAQLSFSKSACDSGVQAGFKVLSSELESTTIYYQFSNEYIVIDRNKSDKQEERKKKDAHREHGRNRHNVKHNAFAAEDESHIEALDLTIVVDNAVLEYRLS

SEQ ID NO: 504 - protein, 645 aa, Unknown
  Description of Unknown: Penicillium steckii sequence
MKSSFILGAALAVVPSWGQTLTAEMIEKMGNNSLFERWRPTSHFLAPSGWMNDPCAPMYDPVRGLYHLQYQYHPNHVSWGNVSWGHATSRDLITWTDVDHHPDNDLPAWKDSEAQSIGTTNLTGNGKHKPALFNHLAIFSGGGQPVNLSGQIDGTLLLFYTGASSLPTAWNTPYARGTESQALAISNDGGVTWEDYENNPILSDPPGNWNLTGWRDPYFISWPELDDLLNASQPHFYAVFGSGIRGVGPRMPLYRAPASNLTDWTFMGALWEPEKNTSLGTIEETGSFGFNFELSNFFSLDDRYFVSMGAEGGNVSFHQNKWSLWNEGTISVRSNGSIAFEPISGGASDWGLLYAISSFNDTKNNRRIQWGWAQEDLDDFGTVQQGYQGAYALPREIFIQNTSNVIRHSSSSSETPGNARFFKNSHGSWTASTLGVRPAPDVVKGLQHGSNHTKYPCTKRSCKTETIKFPKSLSNSYQIALRIEKTNGKAGISVGASPNREEYTNIFFDPRNNTLGVDRDHSSLIKNFTHYTHAGYFKPYEIANGNSSNTKTTTESIDLTIFVDGSLIEVYANDRFALTSRIYPSREDSTGISFFKEDGVDVEYSRFEVWDGLLNAWPDRPKNSSSLLVFDTPAETGNYTWWTGN

SEQ ID NO: 505 - protein, 642 aa, Unknown
  Description of Unknown: Penicillium brasilianum sequence
MKTNTIATAVTLGASTSSVWGQSLTVDMIDKMANNTLFTRWRPTSHFLAPAGWMNDPCGPMYDPVQNLYHLHYQFHPNHVNWGNISWGHATSPDLITWTDVDHLPNDEVPAWKDDQAQSIGTTNITSKHHPSLYNHLGIFSGTSHSVNLTGGVDGTILTFYTSVSRLPTSWSQPYLTGTESQSLAYSTDGGITWEQYENNPILSDPPADWNITGWRDPFFEPWPQMDAFLNLSEPHWYAVLGSGIKEVGPRMPLYRAPASDLTNWTFLGALWEPEKNSTLGSLEETGSYGFNFELSNFFSIGDRYFVSMGAEGGNVSFHQQRWSLWNEGTLSVRANGSVAFEPVAGGASDWGLLYALTTFNDTKKNRRIQWGWAPEDMNSYAITQQGYQGSLALPREIFIKDTPNVIHSLTNSTAPGNARYFANSNGTWTASTLGVRPAPDVVKGLRHGSNHTRYPCHKNKCDTKKITLPIKLSKSYQLDVDIKQTTGIAGVTIAASPDREEYTNIFFNPSNNSIAVDRSHSSLIAEFANSTHEGYFKPYTLRGKNGKNTTESIQMSIFVDGSLVEVYVNERFALTTRIYPSREDSTGIALYSAADAKVEYSRVEIWDGLLNVWPERPENSSSLLVWDTAAETGDYVWWTGN

SEQ ID NO: 506 - protein, 644 aa, Unknown
  Description of Unknown: Penicillium sp. sequence
MKTHTFATAVALGAGSAPALSQSLTVDQINSMANNTLFTRWRPTSHFLAPSGWMNDPCGPMYDPINKIYHLHYQFHPNHVNWGNISWGHATSDDLITWKDVDNNPQDGVAAWKNQQAQSLGTTNLTSDHHTPALYNHLGIFSGTAQPVNLTGGSDGTFLAFYTSVSELPTSWSKPYLKGTESQSLAYSTDGGVTWQEYENNPVMSNPPEGWNVTGWRDPFYHAWPEMDAFLNASEPYYYAVFGSGIKEVGPRMPLYKAPASDLTNWTFLGSLFEPKMNSSLGALPETGSYGFNFEVSNFFSIGDRYFVTMGAEGGDTDFHARRWSLWNEGTLSVRANGSVEFTPVAGGAGDWGLLYAMTTFNDTKNNRRIQWGWASEDMNNFGITQQGYQGSFALPRELFIKDTHNVIHDMSESCMPGNSRFFANSNGTWTASTLGTKPVPDVVEGLHRGAKHHKFPCHEQKCDTEKIKLPTSMSHSYQINLELKSTTGIAGLTIAASPNREEYTNIYYNPSNYSIAVDRSHSSQIKMFANDTHQGYFKPYTVHDSDCNKNTNESIQMSIFVDGSLLEVYVNERFALTTRIYPSREDSTGIAFYKAPCAQVEYSNIEIWDGLLNVWPERPRNSSSLLVFDTAAETNNYTWWEGN

SEQ ID NO: 507 - protein, 482 aa, Bacillus sp.
MDKFRPKYHFTPEQNWMNDPNGMVFFNGEYHLFYQHHPNGTTWGPMHWGHAISSDMVNFEHRPIALYPDENGTIFSGSAVVDWEDTSGFFEGEPGLVAIFTHHDTVPGTDLVRQRQSLAYSVDSGKSWIKYSDNPVLENDRFVDFRDPKVFWHPDAKRWVMILASGQTVCLYHSSNLKEWTFASEFGQGNGSHDGVWECPDLFPLSVDDDPSRTKWVMLVSVGSGPEHIEGSRTQYFIGDFDGHSFVNDNPSDTILWLDHGRDNYAGVSWSDIPDEDGRRIYLAWMSNGKYANVTPTEGWRSAMTIPRILALESRHDQIRLIQKPIQELEKIRTPILSLKESSLEEAQLSLSGLELDSFEMIAEFMPGITDAFEIRVRTSDSQQTVIGYEATRNEIFVDRTLSGIIDFQEDFAGTHAVKLVTENESIKLHIFVDRSSIEVFVNDGIAVITDLIFPEPEANGLGLYASGDRIQLRRFEIFKLG

SEQ ID NO: 508 - protein, 487 aa, Bacillus sp.
MSTITQDNYRGVYHFSPKQNWMNDPNGMVFFKGEYHLFYQHHPFGTTWGPMHWGHAVSKDLVAWEELPIALLPDEHGMIFSGSAVVDWHNTTGFFDDEPGLVAIFTHHVEAAGGTEVKQYQSLAYSKDSGRTWTKYAGNPVLKHESYVDFRDPKVFWHEATKRWVMIVACGQTVCIFTSPDLKDWAFGSEFGEGIGSHDGVWECPDLFPLPVGEGMTKWVMLVSIGDNPAYAEGSRTQFFTGEFDGACFKPDEASASRIRWLDHGRDNYAGVSWSDIPEADGRRLFIGWMSNWKYANQTPTSGYRGAMTTVRELELEERDGVAELIQQPARELERYRRPVVSIERADAATVAAKLSKLRLDSYEIHAVIKADSAIAFKIRIGPEQETVIGYNGPASEVYVDRSRSGISDFHPAFPGRHAAQMKTKDEHVELRILVDRSSVEVFAGGGQIVFTDLIYPDKASMGLTVEAGDAEQAEVIRSLRLYELSL

SEQ ID NO: 509 - protein, 497 aa, Bacillus sp.
MNNVLEKQQYYTEKYRPQYHFSPEKNWMNDPNGMVFYEGEYHLFYQYHPHGTTWGPMHWGHAVSKDLVYWEHLPIGLAPDEHGMIFSGSAVVDWNDSSGLFEGKSGLVAIFTHADTYPETNRARQRQSIAYSKDYGRTWIKYAGNPVLQEEHITDFRDPKVFWHRETNRWVMVVASGQTIRMYTSINLISWEFASEFGEAEGSHQGVWECPDLFELPVDKDPNQKKWVLFVSIGDNPNLPEGSRTQYFTGDFDGRTFLNDNSPETVLWIDHGRDNYAGVSWSDVPYEDGRRIYIGWMSNWRYANVTPTKEWRSAMTLPRVVELQSTEEGNRLVQKPIQEVQRLRTNHVSIQNKVIKPGTNLLNNMKSNTFEILVEFEITSETEFGFKVCKGENEETIIGYEVENQSVFVSRNHSGEGIFHQAFAGKHESKLVPENNKITLHIFVDQSSVEVFGNQGRVVITDLIFPSEENKAMELYVKEGDVTLHSLEFYSLKSTWR

SEQ ID NO: 510 - protein, 500 aa, Bacillus sp.
MTNVLEKTDYYTEKYRPQFHFTPESQWMNDPNGMVFYHGEYHLFYQYHPYGTTWGPMHWGHAVSKDLIHWEHLPIGLAPDEHGTIFSGSAVVDWNDTSGFFEGKSGLVAIFTHADTYPHSDRPRQRQSLAYSKDNGRTWMKYEGNPVLQEESITDFRDPKVFWHRETSQWVMVLAAGQVIRFYTSKNLVSWEFASEFGEGQGSHKGVWECPDLFELPVDGDSNQKKWVLIVSIGSHEKYKEGSRTQYFIGDFNGLTFSNHQSPETTLWIDHGRDNYAGVSWSDVPAEDGRRIYIGWMSNWQYATITPTKEWRSAMTIPRVIELKNTVDGVRLVQNPVRELQGIRGEKSSIENEVVRPGENLLAGMSSNTFEITATFELGAMGTATEFGFKVCKGEDEGTIVGYDVENQQLFIDRTHSGEADFHQHFAAKHECQLLIRDHKISLHVLVDRSSVEVFGNNGESVITDLIFPKEESVQMELYAKNGEVRLQSLELYKMKSVWR

SEQ ID NO: 511 - protein, 493 aa, Bacillus sp.
MNQINVKEKFRPQFHFSPESNWMNDPNGMVYYAGEYHLFYQHHPYGTTWGPMHWGHAVSKDLIHWDHLPIALAPDEHGDIFSGCVVVDWKDSTGFFNGASGLVAIFTHADQYPESGRPRQRQSLAYSTDYGRTWIKYEGNPVLVEDSITDFRDPKVFWHEETNRWVMILAAGNHIRFYTSHNLMSWEFTSEFGAESGSHAGVWECPDIFKLPVDGDLNSNKWVMIVSIGNDSAYVEGSRTQYFIGQFDGVSFTNENSDETVLWLDHGRDNYAGVTWSDILKEDGRRIFIGWMSNWKYANETPTIDWRSAMTLPRELTLKETSDGVRLVQTPVAEFESIRGEKQSWDNITFEPEENILADVSGDQVDIIAEFEFQSATEFGFKIRKSADEETTIGYDAIKNFLFIDRNRSGVSNFNKYFPCKHGASLLKSDNRIKMRILVDRSSVEVFANDGEVVLTDLIFPHPESNGLEIYTKGGSVNLVSLSIYQLSSIYHV

SEQ ID NO: 512 - protein, 492 aa, Bacillus acidicola
MNNTGVLETFRPQFHFTPKSNWMNDPNGMVYYAGEYHLFYQYHPFGTTWGPMHWGHAVSKDLMSWEHLTIALAPDENGAIFSGSAVVDWNDTTGFFHGGSGLVAIFTHADLYPNSDRPRQRQSLAYSTDQGRTWIKYEGNPVLTEESITDFRDPKVFWHEKTNKWIMILAAGDHVRFYTSLNLKDWHFASEFGTESGSHAGVWECPDLFELPVDGDKFNSKWVMLVSIGNDPAYAEGSRTQYFIGDFNGITFTNENGDDTVLWLDHGRDNYAGVTWSDIPPEDGRRLFIGWMSNWRYANETPTEAWRSSMTLPRELTLCETSAGVRLFQTPVAEVETIRQEKHYWDCLTIAPEENILSDVMGDKLEIIAEMELHSSREFGFKIRKSEIEETVIGYNAVEETLFIDRVKSGVSYFNEDFPCRHGFSLKAKNNRVRLHLFVDSASVEVFVNDGELVLTDQIFPDPTSKGLELYTKDGKVKLISLTMFHLNFNHS

SEQ ID NO: 513 - protein, 492 aa, Bacillus idriensis
MTQKLKEKYRPQFHFSPEKNWMNDPNGMVFFNDEYHLFYQCHPFDAKWGPMHWGHAVSKDLIHWEHLPVALSPDDHGTIFSGSAVVDWDNTSGFFDDKPGLVAIYTSHDMYPGSDRHRQRQSLAYSKDDGRTWVKFEGNPVLSDVNITDFRDPKVFWHSETNKWIMVLATGQSITFYTSPNLKEWEFASEFGKHAGSHDGVWECPDLFQLPVDQNTDNQKWVLLVSIGDNPDLKEGSRTQYFTGSFDGLTFVNDNYDETVLWLDYGRDNYAGVSWSDIPSHDGRRIYIGWMSNWRYANHLPTKEWRSAMTLPRVLSLTSSDNGARLVQKPVSEMSTLRKGIHSYHDLSIESNELQSFSLNHHSMEINIEFDKGSSNTFGVIIKHSETEKTVISYDCLKEILLADRTNSGENSFSSSFPAVQKAPLKMKNNRINLQLFIDASSIEIFANDGEVAVTSLIFPSEACKDLIFFSNEGKTNVPELKIIELNSIWNR

SEQ ID NO: 514 - protein, 492 aa, Bacillus sp.
MTQRYKEKHRPQFHFSPEEKWMNDPNGMVFFNDEYHLFYQYHPFGTTWGPMHWGHAVSKDLIHWEQLPIALYPDEHGAIFSGSAVVDWNNTSGFFQDEPGLVAIYTSADTYPDSERPRQRQSLAYSDDNGRTWTKYEGNPVLSDVNITDYRDPKVFWHEETNKWVMVLATGQTVTIYTSANLKEWEFASEFGHQAGSHDGVWECPDLFRLSVDGDENKQKWVMFVSIGDNPEFKEGSRTQYFIGDFDGSTFVNDHHDETVLWVDYGRDNYAGVSWSDIPSHDGRRIYIGWMSNWRYANQVPTEEWRSAMTLPRELLLTSSEAGVRLVQKVVSEINSIRKSSEVYQDLTIESGQPASFNMFSPLVEVNLEFEKQTSNSFGIVLQSSKDEKTVICYDVERELIAVDRTNAGENSFSESFAAVQEAPLKMENEKINLQIFVDTSSIELFANDGKVVITSLIFPNQPYEKIVLFSNEGDTQVSLLKLTELESIWGK

SEQ ID NO: 515 - protein, 489 aa, Bacillus sp.
MTQTYKEQYRPQFHFSPEEKWMNDPNGMVFFNDEYHLFYQYHPFGTTWGPMHWGHAVSKDLIHWEHLPIALYPDELGAIFSGSAVVDWKNTTGFFEENKPGLVAIYTSAGTYPNSDRPLQQQSLAYSKDNGRTWVKFEGNPVLSDVNITDYRDPKVFWHEATNKWVMVLATGQTITIYTSLNLKDWEFASEFGHTAGSHDGVWECPDLFKLPVGEEQDRWVMIVSIGDNGQSKEGSRTQYFIGQFDGTTFVNDHDDSTILWLDYGRDNYAGVSWSDVQDGRSIYLGWMSNWRYANQVPTEEWRSAMTLPREFFLTTTEAGIRLFQKPVAEVQTIRKESESYPDTAIESGRNVSVPVNNSLLELTVEFEKVSSSQFGFIIQHSEEEKTVIGYSAVEEKLFVDRTLSGDKSFSTSFPAVQEAPLKLDNQRLKLQLFLDTSSIEVFANDGEVAITSLLFPRESGQELILFSNEGTTNVLELKVTELDSIWNK

SEQ ID NO: 516 - protein, 491 aa, Bacillus sp.
MTVQYKENHRPQFHFSPKEKWMNDPNGMVFFNKEYHLFYQYHPHGTTWGPMHWGHAVSKDMIHWEELPIALYPDEHGAIFSGSAVVDWNNTTGFFEEAPGLVAIFTHADNYPGTERPRQRQSLAYSKDDGRTWETYEGNPVLSDVDITDYRDPKVFWHEESNKWVMVLATGQTVTIYTSLNLKEWEFASVFGIKEGSHDGVWECPDLFQLPIDGEPGNKKWVMLVSIGDNPKFKEGSRTQYFVGDFDGTTFLNENSEEVVLWLDYGRDNYAGVSWSDIPREDGRRIYIGWMSNWRYANQLPTKEWRSAMTLPRELSLTSTAAGLRILQSPVAEIKTIRGEAESFKNLALDGNEPISYKISELTEIEVKFEKETAESFGLSVLNSKEEKTTISYDAVKEELIVDRTGAGDNSFSESFAAIQVAPLNMDGKTINLQIFVDASSIEVFANNGRIAVTSLVFPHEKADKVNLFSKEGTANVRQLTLTPLKSIWSK

SEQ ID NO: 517 - protein, 494 aa, Bacillus sp.
MTVLKETPKDFAREKYRPQYHFSPKENWMNDPNGMVYFHGEYHLFYQYHPFGTTWGPMHWGHAVSKDMVEWEHLPVALEPDEHGMIFSGSCVVDWEDTSGLFDGNAGLVAIFTHAKEVADGNHIQKQSLAYSKDDGRTWVKYAGNPVLEDASLKDFRDPKVFWHAPDRRWVMVLAAGDWVNIYTSPNLIEWSYASSFGKEEGAHLGVWECPDLFPLQVDTSNEKKWVMIVSIGDDPQYEEGSRTQYFIGEFDGEHFVADEPEAVRWLDYGRDNYAGVTWSDIPEEDGRRILLGWMSNWRYANQLPTESFRSAMTLPRELTLRTTQSGIRLFQSPVKELGTLEETISEKVDVSVAGNYRLADDLKTGTLKVELTVDPTDSRHFQLVLPTTNGEKTVIGYESDTSRVYIDRSLSGEDRFHEDFSGCHAAYVPPTGRPMTWQVYVDHSSVELFVNDGEVVLTDLIFSEGVVQGVELTAEEGHAAVSKLKVARIRSAM

SEQ ID NO: 518 - protein, 494 aa, Bacillus sp.
MIPRSNYSEKHRPQFHFTPESNWMNDPNGMVYFNGEYHLFYQYHPYSSVWGPMHWGHAVSKDFIHWEHLPIALKPDQNGAIFSGSAVVDWDDTTGFFNGQSGLVAIFTHADTYPGSERPRQRQSLAYSSDNGRSWTFYKGNPVLSEPRILDFRDPKVFWHKETNRWVMVIASGQSISIYTSLNLIDWEFASTFGEKEGSHQGVWECPDLFKLPVDHDPSKQKWILIVSLGDHPDVESGSKTQYFIGEFDGETFRNDHHPDHVCWLDHGRDNYAGVTWSDLPDHDGRRILIGWMSNWRYANETPTEGWRSAMTIPRELFLKSTSAGVKLTQLPVTELNNIKEPLALFKEQKIQSGENVLAGIRGNTLAITIDLDPGSSEVVGLKVLKSDKEETIIEYDPGTEILTFDRSRSGDCSFHSSFACKQTVKMESLHKRLRLTVLIDRSSIEIFGDGGETVLTNLVFPKEDRNGLELYSSGEGFIHSMEINRLKSVWSNQ

SEQ ID NO: 519 - protein, 490 aa, Bacillus sp.
MISKLVTCQEKYRPQYHFTPKNYWMNDPNGLVYYQQEYHLFYQFHPFGTKWGPMHWGHAVSEDLVHWKHLEVALVPDENGMIFSGSAVVDWNDTSGFFNGKSGLVAIFTHHDTDPNSEKPRQRQSLAYSLDNGRTWIKFNDNPVLVNKEKIDFRDPKVFWHEDTKKWIMVLAAGDCIDIYSSPNLKEWRFESSFIGHSGEKFGVWECPDLFKLPVEGDSNQTKWVLLVSHGDQPASLYGSRTQYFVGEFDGHNFTKNGSDHNVKWLDKGKDNYAGVSWSDTVDARRIYIGWMSNWRYANETPTQGWRGAMTLPRELFLTSKGLLIQKPVKELENLRDEHIQIKNQMLEPDKDLLSNLQGTTWEIIAEFEFEEAKEFGIKVCKSTKKETLIGYNVDKEEIYIDRRISGETSFNEFFSSLDCVAVKAQNNRIKFHVYLDRSTIEVFGNNGEIAMTNLIFPDSQSHGLELFSNGGNVKLLSMDMYRLKSIWSS

SEQ ID NO: 520 - protein, 492 aa, Bacillus sp.
MIQKLTEKYRPQFHFSPEEKWMNDPNGMVFFEGEYHLFYQFHPSDTIWGPMHWGHAVSKDLIHWEHLPVALHPDEHGTIFSGSAVVDWNNTTGFFDDEPGLVAIFTHHDTYPETDIVRQRQSIAYSHDKGRTWIKYEGNPVLTDPSMTDYRDPKVFWHEATNKWIMILATGQCVTLYTSPNLIDWEFASQFGDHDGSHAGFWECPDLFPLQVDQDPSNQKWVMIVSIGDTGAFREGSRTQYFIGDFDGTTFKNDNDAKTVLWLDYGRDNYAGVSWSDIPESDGRRIYLGWMSNWRYANLVPTTDWRGAMTLPRELNLVSTTNGIRLIQKPVTEVNSLRENGFHHDEEVIVNMHPLSITLDDALQEINIEVENIDSSVIDCVIKHSNTEETLIQYDTEKEELIVDRTNSGEHSFSSSFQAIQHAPLSMVHNRIKLQIFLDTSSIEVFANDGAAAVTSLIFPTEGSKKLELSSQSGSVKIHSLQLTKLSSIWSE

SEQ ID NO: 521 - protein, 492 aa, Bacillus sp.
MVSEKSNLLSSEKYTENYRPQYHFTPEANWMNDPNGMVYFEGEYHLFYQYHPYSTVWGPMHWGHAVSTDLIHWEHLPIALYPDENGTIFSGSAVVDWKDSSGFFNGGTGLVAIFTSADGPKQTQSIAYSTDKGRTWITYDGNPVLIDHTIADFRDPKVFWHEESHKWIMILAVGSHVRIYLSDDLKTWDFASEFGRAAGSHDGVWECPDLFKLPIGDTDKKKWVMIVSIGNDEAYPEGSRTQYFVGEFDGKTFINDNPDETVLWVDYGRDNYAGVTWSDTLDERRVFIGWMSNWKYANITPTKEWRSAMTLPRELSLHNMPEGIRLTQTPVKEIESLRNENRKWQDIIIHSNSDNVLSDCKGKEIEIVAEFELNSATEFGFEVRNSNEEKTIIGYDAVKEELFIDREHSGETSFHPLFACRHSARVEPEENRVKLRLFLDWCSVEVFANSGETIMTDLIFPSSTSDGLALFASGGDVTLVSLEVYQLNSIWK

SEQ ID NO: 522 - protein, 492 aa, Bacillus halmapalus
MTNEVYKEKHRPQFHFSPEQKWMNDPNGMVYFNEEYHLFYQHHPFGTTWGPMHWGHAVSKDLIHWEHLPIALFPDEYGDIFSGSAVVDWNNTSGFFEEAPGLVAIYTSAGTYPDSDRPCQRQSIAYSKDAGRTWIKYEGNPVLSDINITDYRDPKVFWHSETNKWVMILATGQTVMLYTSPNLLEWEFASEFGNRAGSHAGVWECPDLFKLPVDGEDNNEKWVMLVSIGDNPEFKEGSRTQYFIGQFDGTTFVNDNTDETILWLDYGRDNYAGVSWSDIPSEDGRRMYIGWMSNWRYANLLPTDGWRSAMTLPRELTLTASDEGARLVQKPVVGIEAIRKGASISENFTIDSNDVSYEMVSDRMEVNLEWEAQNADSFGLVVQSTADEKIIIQYDVAKGLLSVDRTNAGDNSFSESFAAVQEAPLKLKNNKLELQLFIDTSSLEVFANDGEAAFTSLVFPSKPYNQLNLFSKEGTTKLNYLKLTELDSIWSK

SEQ ID NO: 523 - protein, 500 aa, Bacillus sp.
MYTNMDEKHRPQLHFSPKENWMNDPNGLVFFNGEYHLFFQHHPFSATWGPMHWGHAVSKDLIHWEQLPIALHPDHNGAIFSGSIVVDWNDTSGFFGGKPGLVAIYTSADEYPGTDRPRQRQSLAYSSDSGRTWTVYGGNPVLTDENIIDYRDPKVFWHSETERWVMVLATGQTITLYTSPDLKEWQFASEFGSGQGCHDGVWECPDLFPLPVGGNDDAIKWVMLVSIGDNPQFDEGSRTQYFIGSFDGKAFVNEMAEGETRWLDYGRDNYAGVSWSDIPAEDGRRIYIGWMSNWRYANIVPTEGWRSAMTLPRELKLIADGESIQLIQQPVEGLADLHLTKTAAENIHLGESQEESFDLPSALAEIQISFEGGGTEAFGIAFENSLDEQLAIHCEPDKGELEVDRTHAGDNSFSDSFAAIQKAPLEWMEESVHLQIILDASSVEVFANGGRAAITSLVFPGEPYKKVSIFSKKGSVTATIFEITELSSIWTACLTEGGQK

SEQ ID NO: 524 - protein, 488 aa, Bacillus sp.
MKQLYKEKYRQQFHFSPEEKWMNDPNGMVFFNNEYHLFYQYHPFGTTWGPMHWGHAVSKNLIHWEQLPIALFPDEHGEIFSGSAVVDWNNTSGLFQNGPGLVAIYTSADNYPDSDRPRQRQSLAYSTDNGRTWTKFEGNPVLSDVNITDYRDPKVFWHEETNKWVMVLATGQSITIYTSPNLKDWEFASEFGNNSGSHDGVWECPDLFQLPVDGDESIQKWVLLVSIGDNHEFKEGSRTQYFIGQFDGTTFVNDNSDETILWMDYGRDNYAGVSWSDIPAEDGRRIYIGWMSNWRYANQVPTEDWRSAMTLPRVLSLASNEAGVRLKQKVAAEIETIRKSSEVYQDLTVEANQPAIFNMFSPLMEVSIQLENQTSNSFGIVFQNSEDVNTVIRYDAEKEMLLVDRTKAGDNSFSESFPAVQEAYVKLENLQIIIDTSSIEVFANDGKVAFTSLIFPNQPYEKIVLFSNEGNIRVSSLKLTELDSIWGK

SEQ ID NO: 525 - protein, 496 aa, Bacillus sp.
MKTLYREKYRPQFHYSPEKKWMNDPNGMVYYEGEYHLFYQYHPFGTTWGPMHWGHAISRDLIHWEQLPIALFPDEHGTIFSGSAVIDWNDTTGFFQGGSGIVAIYTSHDVYPGTERPRQQQCLAYSNDKGRTWVKYEGNPVLADKSVTDYRDPKVFWHEESEKWVMILATGQTITLYTSLNLIEWEYASEFGHKAGSHDGVWECPDLFELPVDGDDNNKRWVMLVSIGDNPSFPEGSRTQYFIGQFDGKTFVNENSDGTVLWLDNGRDNYAGVSWSDMPEADGRRIYIGWMSNWRYANVLPTEGWRSAMTLPREILLTSDETGVRILQKVVSEFQLLRKHTETIKEIIVESSNPFQCVVQSRLMEVKISFEKRDTTSFGAIFKNYHQEELIIQYDTESHKLTVDRRNAGISNFSDSFATIQEAIVKLENNQIHLQILLDTSSIELFTDNGKTVFTSLIYPEEPYNELILFSTRGAVHVSSLQLTDLSSIWDNGIRS

SEQ ID NO: 526 - protein, 471 aa, Bacillus sp.
MNDPNGMVYFNGEYHLFYQHHPFGTTWGPMHWGHAVSNDMIHWEHLPIALHPDEHGDIFSGSVVVDWNNTSGFFNDTEPGLVAIYTSAGKYPESDRPCQTQSIAYSINNGRTWMKYEGNPVLSNPDVIDFRDPKVFWHKETCKWIMVIASGQTITIYTSTNLKNWEFASEFGHQAGSHDGVWECPDLFELEVDGNPEQRKWVLFVSIGDNPRFKEGSRTQYFVGSFDGTTFVNDNKKETVLWLDYGRDNYAGVCWSDIPVEDGRRIYIGWMSNWRYANVVPTKEWRSAMTLPRELSLKTSEEGVRIVQHPVKEMDTIKKATIEYKGLTVESASPVRIPLKNQLNEIVLTFEQCDAGKFDIVIQHSETDKTVVIYDFVKKMLLVDRSDSGEVGFSESFSIVQEAPLKPVNNKVKLQMFVDTSSIEIFANDGQSVITSLIYPSDGKKELVLISSEESTTIYDLNITPLESIWT

SEQ ID NO: 527 - protein, 493 aa, Bacillus sp.
MIKTRYKEKHRPQYHYSPEEKWMNDPNGMVFFEGEYHLFYQHHPFGTTWGPMHWGHAVSKDLIHWEQLPIALHPDEHGTIFSGSAVVDWNDTTGFFDGKAGLVAIYTSHDSYPDSERPRQRQSLAYSKDNGRTWIKYEGNPVLSDEEITDYRDPKVFWHMESNKWVMILATGQTVTLYTSCNLIEWEFASEFGHQAGSHDGVWECPDLFELPVDGDESNKRWVMLVSIGDNPAFPEGSRTQYFIGQFDGKTFVNEHSDGTTLWLDFGRDNYAGVSWSDVPEDDGRRIYIGWMSNWRYANLLPTEGWRSAMTLPRELFLTTTEEGVRVVQKVVSEIQVLRNESEVIEEVSLAPNNPIHCDLLSSLMEVNISFEKRDSTSFGVIFENSIQEKVIIQYDTVVEKLTVDRVNAGINHFSDSFAAIQEAIVKTENNQIHLQIWLDTSSIEVFANDGKSVCTSLVYPNQPYNKMVIFSKNGTTNISSLVLTELSSIWEK

SEQ ID NO: 528 - protein, 493 aa, Bacillus sp.
MNKIYNEKHRLQFHFSPEKKWMNDPNGMVFFKDEYHLFYQYHPFGTTWGPMHWGHAVSKDMIQWEHLPIALYPDEHGEIFSGSAVVDWNNTSGFFDDEPGLVAIYTSADNYPNSDRPRQRQCLAYSKDNGRTWRTYERNPVLSDVNITDYRDPKVFWHEETSKWIMMLATGQSISIYTSPNLKEWEFASEFGNNAGSHDGVWECPDLFKLPIDGDDTNQKWIMLVSIGDNPKFKEGSRTQYFVGQFDGTTFLNDNPDEQVLWLDFGRDNYAGVSWSDIPAQDGRRIYIGWMSNWRYANQVPTEEWRSAMTLPRELSLTSSEEGNRIVQKIISEIDSIRNHTEVTQELTIESDSPVTFNLTSPLMEVNVKFDNKDSNSFGLIFENSKNESIMIQYDTASEKLMVDRTKAGVNSFSESFAALQETDLKMEDGKINLQIFMDTSSIEVLANGGKAVCTSLLFPKHLYERIIIFSNKGTTRVSPLKLTELNSVWGKY

SEQ ID NO: 529 - protein, 486 aa, Bacillus sp.
METINIEKYRPSLHYSPKKNWLNDPNGLIYFKGEYHLFYQHNPHDSKWGPMHWGHAVSKDMIKWEELDIALYPDKLGTIFSGSAVIDWHNSSGFFPEEPGMIAIFTHHFVEPNQTEPVQSQSLAFSYDQGRTWTKYEGNPVLKHSTKVDFRDPKVFWHSKSEKWIMILATGQTITIYSSPNLIDWQLESEFGEGIGSHEGVWECPDLFELNVENSDEKKWVLLVSIGDNPLFDKGSRTQYFIGTFDGSTFTADNSNNEVLWLDFGKDNYAGVSFSDIPREDNRRIYLGWMSNWRYANQVPSQGWRGQMTLPRVLTLRYIEDKLKIVQKPVKELDRYFTKKYEIYDEIIISKVEKTIEIDESSLEIVLNIDNLNAEKFGLVLYYTETQKTTVTIDASKNLLTLDRKDSGEVHFSEIFANSQEVKIHDSKRINLRIIVDASSVEMFVNDGNYALSSLIFSDKVCEKVSIFSLDGDIRIRNYSISSPNL

SEQ ID NO: 530 - protein, 484 aa, Bacillus sp.
METYNLEKYRPNLHFAPQKNWMNDPNGLIYFNGEYHLFFQHNPHDSIWGPMHWGHAVSKDMITWEELEIALFPDELGTIFSGSTVVDWNNTSGFFPDEPGMVAIFTHHLDGTDQTPPVQTQSLAYSHDKGRTWTKYEGNPVLKHSTKLDFRDPKVFWHDQTEKWIMVLATGQTISLYSSPNLIDWQLESEFGEGIGSHDGVWECPDLFELTVENSGEKKWVLFVSIGDDPQFESGSRTQYFIGSFDGSTFTAENNEIQWVDFGKDNYAGVSFSDVPKDDGRRIYLGWMSNWRYANQVPTEGWRSQMTLPRTLALRNIEDKLLVVQRPVKELDQYFVKKLDLNDVTIKSGEQKTYNIDGSSVEFVLNIENMNSKEYGLVIAHTETQNTVITIDPITNQLIVDRKNSGQVDFSENFSNRQEMKINTTDHVNLRIILDASSIEVFVNDGAYALTSLIFPDKTCEQVSIFSSAGDIKIANGYISASES

SEQ ID NO: 531 - protein, 487 aa, Bacillus sp.
MKIAKLERFRPVLHFSPKQNWMNDPNGLVFFKGEYHLFFQHNPNDSIWGPMHWGHAVSKDLIKWEELDIALYPDELGTIFSGSAVIDWYNTSGFFPEEPGMVAIFTHHLDNNDRTPPIQTQSLAYSHDQGRTWIKYQGNPVLTHPSKIDFRDPKVFWLEEQAKWIMVLATGQTVSLYSSSNLKEWHFESEFGEGIGCHDGVWECPDLFELTVENKDEKKWVLIVSIGDNLKYDHGSRTQYFLGSFDGSAFKADDWDIRWLDFGKDNYAGVSFSDIPEEDGRRLYLGWMSNWRYANEVPTEGWRSQMTLPRSLSLRDEKAGLKLIQTPVNTLERYFKRTKNISESVVRGDVEYKLEGIETSLHIQLNIENLNAKQYGVVIYHTSNQFTTITINAIDNYLRLDRNNSGEVGFSNNFLISQELNLEETSDINLLIIVDTSSIELFINEGGYALTSLIYPDKVSEKISVFSRDGEIKLTDSYISTPNNEEV

SEQ ID NO: 532 - protein, 484 aa, Bacillus sp.
MKTTKLEKYRPALHFSPKRNWMNDPNGLVFFKGEYHLFFQHNPNDSIWGPMHWGHAVSKDLIKWEELEIALYPDEHGTIFSGSAIVDWNNTSGFFPNEPGLVAIFTHHLEETDHPPKQSQSLAYSYDKGRTWIKYDGNPVLTHPTKVDFRDPKVFWHEESSKWIMVLATEQTISIYSSPNLIDWQFESEFGEGIGSHDGVWECPDLFELTVENSNLKKWILIVSIGDNPRFDSGSRTQYFVGSFDGNQFVAEHDDLKWLDFGKDNYAGVSFSDVPKEDGRRIYLGWMSNWRYANQVPTDGWRSQMTLPRELTLLETNGKFEVVQKVVRELDKYLTKKEEINNVTLDAESTKSFEVDADYVDINLTFENIDADKLGLTIHHTRTQYTTVSIDTKDNVLLLDREHSGEVDFSENFSKPQMLGLKRTDGAQLRIVVDSSSIELFINEGEQALTSLVYPDKACERVSVFTMGGKANVIKGKITIPSIN

SEQ ID NO: 533 - protein, 486 aa, Bacillus sp.
MAIQDLQKYRPEIHFAPKENWMNDPNGLVYFEGEYHLFFQYNPNDSVWGPMHWGHAVSKDMITWEELDIALYPDENGTIFSGSAVVDWKNTTGFFPDEPGLVAIFTHHKDGVEGKPQVQTQSLAYSHDKGRSWTKYEGNPVLGHATKVDFRDPKVFWLQDTDKWIMVLATGQTITFYSSPNLIDWQIESEFGDNIGSHDGVWECPDLLQLKVEGSNEEKWVLFVSIGDNPQLDAGSRTQYFIGSFDGSTFKAEHTDIRWLDFGKDNYAGVSFSDVLDGRRIYLGWMSNWRYANEVPTEGWRSQMTLPRELSLREVADKYQVVQKAVKELDSYFSNKEDLEETIVRESETKSYKMTNSYGEIVLNIQRVDATQFGITLKHTEEQSTTLKFDSKEDVLVLDRLKSGPHDFSENFSKEQSLKLEDTTKVQLRLVIDSSSVEVFVNDGAYALTSLIYPDEIGEEFSVFAVDGTVKITDSYVSQPQKNQIT

SEQ ID NO: 534 - protein, 485 aa, Bacillus subtilis
MEIAKLERYRPALHFSPKQNWMNDPNGLVFFKGEYHLFFQHNPNDSIWGPMHWGHAVSKDLIKWEELDIALYPDELGTIFSGSAVVDWHNTSGFFPEEPGLVAIFTHHLEDEDHTPSVQTQSLAYSQDDGRTWVKYKGNPVLTHPTKIDFRDPKVFWHQPSHKWVMVLATGQTISIYSSPNLKDWKFESEFGEDVGSHDGVWECPDLFELSIENSNEKKWVLIVSIGDNPQLDSGSRTQYFVGSFDGNKFVPEHDEIKWLDHGKDNYAGVSFSDIPKEDGRRIYLGWMSNWRYANDVPTEGWRSQMTLPRELILRETSGDFHIVQKVVRELDTYLTSKEDINNVIIGTEDTNIYELDSEYAKIELILESEDASQYGLAIHHTKTQYTSITIDTKDNVLLLDRKNSGKVDFSDNFSRTQKVKLEDTNQIQLQIIMDSSSLELFINDGEQALTSLVYPDKACESISLFASEGMANVVHGKFSIPSID

SEQ ID NO: 535 - protein, 485 aa, Bacillus sp.
MKITKLDKYRPALHFSPQQNWMNDPNGLVFFKGEYHLFFQHNPNDSVWGPMHWGHAVSKNMIEWEQLDIALSPDEHGTIFSGSVVVDWHNTSGFFQEEPGLVAIFTHHLEGKNHPKTKQMQSLAYSYDKGRTWLKYENNPVLTHPTKIDFRDPKVFWHEASHKWIMVLATGQTISIYSSPNLKDWTFESEFGEKIGSHDGVWECPDLFELPVEHSDEKKWVLLVSIGDNPEFDSGSRTQYFIGSFDGHTFVEEHDDIKWLDFGKDNYAGVSFSDIPKEDGRRIYLGWMSNWRYANHVPTKGWRSQMTLPRELSLIEIDGEIQIVQKAVRELEPFFTKKEELNHVIVNSKDKHHFNIHADYAEVELVLENIDATQYGLTIHHTNTQYTKITVDAKDNKLLLERKHSGNVDFSDNFPKPQMVKLNGTEQLQLRLIVDSSSLELFLNGGEHVVTSLVYPDKACEGVSLFTSEGEIKVVHGKLSIPAKN

SEQ ID NO: 536 - protein, 482 aa, Bacillus sp.
MSLCQVQKYRPHLHFSPQENWMNDPNGLIYFKGEYHLFFQYNPNDSKWGPMHWGHAVSKDLIKWTELPIALYPDENGTIFSGSAIVDWNNTTGFFPDEPGLVAIFTHHLENEVYIPPKQSQSLAYSYDNGRTWVKYQHNPVLEHDSNVDFRDPKVFWHHSSNKWMMVLATGQTISIYSSPNLIDWCFESEFGDNIGSHDGVWECPDLFELQVENSEESKWVLFVSIGDNPKFEKGSRTQYFVGTFNGSVFQAEHEDEKWLDYGKDNYAGVSFSDIPVEDGRRIYLGWMSNWRYANEVPTQGWRSQMTLPRELEIRKVKDSYSVIQKPVQELDVYFTRKEVINNKLIDKELRYDFDESYGMITLNIENMDATKYGVDIHHTQSNVTSIIIDTQKQLLILDRKNSGMNSFSDNFSMPQEIKLFDTQKIKLNLVIDSSSIEIFGNEGEFAITSLVYPDKACEEISLHALNGEMKVEKGYLLKPRT

SEQ ID NO: 537 - protein, 484 aa, Bacillus sp.
MKIDQNQKYRPSLHFSPKEKWLNDPNGLVFFKGEYHLFYQHNPNDSVWGPMHWGHAVSKDLIEWEQLDIAIYPDELGTIFSGSAVIDWNNTTGFFPNDPGIVAIYTQHLDSSDETGPKQVQSIAYSHDHGRSWIKYNGNPVLTHPTKVDFRDPKVFWYEQENKWIMSLATGQTISFYSSRNLIVWKFESEFGENIGFHEGVWECPDLFELPVENSGEKKWMLIVSVGDNSKLDEGSRSQYFIGSFDGNTFKPEHEEIKWLDYGKDNYAGVSFSDIPEEDGRRIYLAWMSNWRYANQVPTEGWRGQMTLPRELSLKKVDGDINVVQRVVKELDSYFQVKEEITDIMINDASPLSVNISERFVDVDLSFKNSNSSLYGVTVHHTKSHYTGIHIDTNNNTLTVTRENSGEVDFSDNFSLSQSIVLMDTSELKLRLIVDSASIELFVNEGEYSLTSLIFPNFACERISLFSADGEVQLKNGKFSVPSK

SEQ ID NO: 538 - protein, 485 aa, Bacillus circulans
MKITKLEKYRPALHFSPKKNWMNDPNGLVFFKGEYHLFYQHNPHGSTWGPMHWGHAVSKDLIVWEELEIALHPDENGTIFSGSIVVDWNNTTGFFNDEPGLVAIFTHHLEPVHGKEAVQTQSLAYSLDKGRSWIKYDGNPVLAHPSKPDFRDPKVFWHKESQKWMMALATGQTISFYSAPNLKDWKFESEFGENCGCHEGVWECPDLFELPIDNSNDKKWVLIVSIGDNPQYDEGSRTQYFVGSFDGKEFMPEHEEIKWLDYGKDNYAGVSFSDIPEADGRRIYLGWMSNWRYANQVPTEGWRSQMTLPRVLELREEKEEYYLVQHLVRELDTYFERKEERTDTIITAKESTVFEVDDEYTEIILSLKNINANKYGLKIEHTDLQHTTITIDVNENVLSLSREKSGIVDFSDNFPKLQRVYLEDSQSLDLRIIVDSASLELFINGGEQALTSLIFPDKVSKRVCLFAKDGEVNLVYGKVSVPSKN

SEQ ID NO: 539 - protein, 485 aa, Bacillus sp.
MKITKLEKYRPALHYSPKRNWMNDPNGLVFFKGEYHLFYQHNPNDSIWGPMHWGHAVSKDLIVWDELDIALFPDENGTIFSGSIVVDWNNTTGFFSEEPGLVAIFTHHREGQIGNQAVQTQSLAYSFDKGRTWTKYNGNPVLSHPFKSDFRDPKVFWHKESDKWIMVLATGQTISFYSSPNLKDWKFESEFGEHVGSHDGVWECPDLFELTIKNLNVKKWILMVSIGDNPQFETGSRTQYFVGSFNGERFIPEHEDIKWLDYGKDNYAGVSFSDIPKEDGRRIYLGWMSNWRYANQVPTEGWRSQMTLPRELELCEINGDYHLLQNVVREIESYFEIKEERTETIISEREGNIFEVNANYTKILLTLENLDANEYGFTIQHTDTQYTTITIDPKENQLCLNREKSGVIDFSDNFPKLQRVKLRESNRIHLQLIIDSSSLELFINEGEQALTSLIYPDKACKRISLFASEGKINLVCGKVFVPFEN

SEQ ID NO: 540 - protein, 483 aa, Bacillus sp.
MPTQDLLTYRPHLHFAPKKYWVNDPNGMVYFKGEYHLFYQHNPNDCIHGPMHWGHAVSKDMITWEQLDIALYPDALGTIFSGSVVVDWNNTSGFFPEEPGLVAIFTHHLHEGGEEPVQSQSLAFSHDQGRTWTKYQHNPVLVDHAKIDFRDPKVIWHKDKSRWVMVLATGQTISIYSSTNLIEWQFESEFGELVGSHEGVWECPDLFELPVTGKNKSEWVLLVSIGDNPDLDSGSRTQYFVGSFDGQIFSPHQEDTKWLDAGKDNYAGVSFSDIPEKDGRRIYLGWMSNWRYANDVPTYGWRSQMTLPRVLKLHQDQDGYTIIQTPVEELDFYMAKAQTLSDVIISDNSPIQMKLDEPYFIMDFVIENVDAASYQLILHHTADQFTSIHIDMGKGELSLDRSTSGKVDFSENFSHVQTVKIDRTDVLKLYAVADSSSIELFINDGKYALTSLVYPNKISSEITLSSSGGKVKIADGTILIPAK

SEQ ID NO: 541 - protein, 492 aa, Bacillus sp.
MMQKLKEQYRPQFHFSPDEKWMNDPNGMVFFNDEYHLFYQYNPFDTIWGPMHWGHAVSKDLIHWEQLPVALYPDEHGTIFSGSAVVDWQNTSGFFDDDQPGMVAIYTSNDSYPDSNRPRQRQSLAYSKDNGRTWVKYENNPVLSDQTKTDFRDPKVFWHDSTKKWIMILATGQSVTIYTSPNLIEWEFASEFGSNAGSHAGFWECPDLFPLQVENEENKTKWVMLVSIGDTGTSKEGSRTQYFIGEFDGVTFFNDHDDETVLWLDYGMDNYAGVSWSDIPCTDGRRIYIGWMSNWRYANHVPTKDWRGVMTLPREVTLISRNEGISLFQRPVSEVRLMRRDRIVHHNLIVESDKLVSFEMTSPLMEINLELEQLNTEKFDLIIQYSDLEHMKIQYDVLDERLIVDRSNSGEHHFSSSFPVLQEAPLKSKNHRIKLQLFIDTSSIEIFANEGEAAVTSLLFPSEGCKKLLLHPYDGNIKVSTLELTDLDPIWG

SEQ ID NO: 542 - protein, 497 aa, Bacillus aquimaris
MSLYSETYRPQFHFSPKEKWLNDPNGMVYFEGEYHLFFQYHPQGTTWGPMHWGHAVSRDLIHWEELPIALYPDEHGAIFSGSAVVDWKNTSGFFEKGNGGLVAIYTSADSYPDSDRPRQRQSLAFSLDHGRTWEKYEGNPVLSDEDITDYRDPKVFWHEESERWVMVLATGQTITIYTSPNLIDWEFASEFGQDEGSHSGVWECPDLFPLMVDGNPDHVKWVMLVSIGDSPDFKEGSRTQYFVGDFDGKTFSNHHNADTILWLDHGRDNYAGVSWSDIPEKDGRRIYLGWMNNWRYANQVPTETWRGAMTLPREMTLISTTDGVQLLQKPVSEMSRIRKESKVIKAIGLTDEAYSMDVNHELMEVNLAVTLEEAKEFRLTIHHSSDEKTSIRYNRITHMLSIDRTQSGEHGFSDSFPGISECPVELMDDTLNLHIFLDSSSLEVFAQGGRGVLTNLIFPKGTNPTLSLTALGGGAKVEELMVTELSSIWGKEVREHE

SEQ ID NO: 543 - protein, 496 aa, Bacillus sp.
MTQKSNKVAHKYKGQYRPQFHFTPEENWMNDPNGMVYFNDEYHLFYQHHPFGTTWGPIHWGHAVSKDLIHWEHLPIALYPDENGAIFSGSAVVDWYNTSGFFDEQPGLVAIYTSADNYPDSDRPRQRQSLAYSSDNGRTWVKYKGNPVLSDVNITDYRDPKVFWHDDSNKWVMVLATGQSVTIYTSPNLIDWEYASEFGNKAGSHEGVWECPDLFQLPIDDDKSYQKWAMLVSIGDNPEFKEGSRTQYFIGQFDGTTFVNDNDDDTILWLDYGRDNYAGVTWSDLPDERRIYIGWMSNWRYANQVPTNEWRSAMTLPRELSLISTEEGVRLVQKLVSEINKIRKETNIHKEIVIDSNNPVCIDLNNKLMEIEIELEQINLSKFDLLIQHSETEKTIISYDVRNSSLLVDRTNSGEISFSTSFPAIQEAPLKMKNNKIKLQLFIDTSSIELFANDGEIAMTSLIFPSEIGKSLTLVSNGGSTNISTLKVTELESIWK

SEQ ID NO: 544 - protein, 492 aa, Bacillus sp.
MSKTLYKEKYRLQFHFSPEEKWMNDPNGMVFFNGEYHLFYQHNPLGTTWGPMHWGHAVSKDLIHWEQLPIALNPDEYGTIFSGSAVVDWNDSTGFFNGEAGLVAIYTSHDTYPDSDRARQRQCLAYSRDNGRTWLKYEGNPVLTDENITDYRDPKVFWHKETNKWVMVLATGQTITFYTSTNLKEWEFASEFGRGSGSHDGVWECPDLFELAVDSDENNKRWVLLVSIGDNPSFPEGSRTQYFIGQFDGKTFINENSDNTTLWLDFGRDNYAGVSWSDLPDEDKRRIYIGWMSNWRYANVVPTDGWRSAMTLPRELTLATTESGVRLVQKVVSEFNQLRSNKEDIGNITLISEKEFNMTLPSELIELNFTFEKSDAAAFGIILENTVNEKVTIQYDTVAQKLFVDRMNAGECQFSDSFPAIQETTVTMENGQINLQVLLDTSSIEVFANGGKAVCTSLIFPSQAYRKLTLFSKDGSTHVRDAVLNNLSSIWD

SEQ ID NO: 545 - protein, 501 aa, Bacillus sp.
MTNDYQEKTTLYSETHRPQFHFSPKEKWLNDPNGMVYFEGEYHLFFQYHPHGTTWGPMHWGHAVSRDLIHWEELPVALYPDEHGAIFSGSAVVDWKNTSGFFEEGNGGLVAIYTNADTYPDSDRPRQRQSLAFSRDKGRTWETYKGNPVLSDEDITDYRDPKVFWHEESERWVMVLATGQTITIYTSPNLIDWEFASEFGQGEGAHTGVWECPDLFPLMVDGNPDHVRWVMLVSIGDNPHHKEGSRTQYFVGDFDGKTFINSYDGDTIFWLDHGRDNYAGVSWSDIPEKDGRRIYLGWMNNWRYANHVPTESWRGAMTLPRELNLISTAEGIQLLQKPVSEINEIRKEPQIFKVIGLTEKGYSIDVNHELVEVNLSVTFEDAQEFELVINHSTDELTSVNYNRFTGMLSVDRTQSGKSGFSDSFSGISEVSVDLLDDTLILQLFLDASSLEVFAQGGRKALTNLIFPKQTKCTLSLSALGGGAMVEEISITKLSSIWGKGV

SEQ ID NO: 546 - protein, 487 aa, Bacillus sp.
MKPILTEKYRPQFHFSPLEKWMNDPNGMVYFQGEYHLFYQFHPYSTIWGPMHWGHAVSKDLIHWEQLPAALHPDEHGAIFSGSAVVDWENTTGFFDDQPGLVAIYTSHDTYPGSDRPRQRQCLAYSSDNGRTWTKYSGNPVLADETKTDYRDPKVFWHSETKHWIQVLATGQSATIYKSPNLIDWQFASEFAEGSHAGFWECPDLFPLPLDSGKEKWVMLVSLGDTGEHAEGSRTQYFIGDFDGETFVNDHEKETVLWLDYGRDNYAGVSWSDLPARRIYIGWMSNWRYANQVPTKEWRGVMTIPRELSLISNADGIRLIQKPVSEAQVLRMGCESFKDKLVTTEQPVSIPLKSALLELNLEVEFEGPALAEITIQHSEAEKTIIRYDSETETLSADRTASGEADFSASFPAVQEAPLKMKDNSIRLQLFLDASSIELFGNDGECAITSLVFPESKESVLHLASHGGAIKIRSMELHELSSIWNKEG

SEQ ID NO: 547 - protein, 492 aa, Bacillus marisflavi
MRNQTEKEMYTEKFRPQFHFSPGEQWMNDPNGLVYFEGEYHLFFQHHPDGNTWGPMHWGHAVSKDLVHWEELPIALYPDELGTIFSGSAVVDWHNSTGFFQEGKPGLVAIYTNHDTDPVSGKIRQRQSVAYSVDNGRTWSKYEGNPVLENVSLQDYRDPKVFWHDESGKWVMVLATGQSITIYHSPDLLIWTYASTFGHEEGSHEGVWECPDLFPLQCDGEKRWVMLVSIGDHPDYIEGSRTQYFIGDFDGGTFTNENPADLILWLDHGRDNYAGVSWSDLQDGRRIYIGWMSNWRYANDVPTDRWRSAMTLPRELGLKNSPSGYRLIQRPVRELADLSEDGTAAKTPLLLNEGETYQERMQTNLAHLHFETEADTNSVWSLTIRHGREEVSLLTCRVSEGILTLDRRRSGVHSFSASFPTVQMAEYAGDGEAGFHLYIDTSSIEIFSTDGRLAMTSLIFPEGESLEFECRALTGNVVLKEWKVSALRSIWS

SEQ ID NO: 548 - protein, 545 aa, Unknown
  Description of Unknown: Aureobasidium sp. sequence
MLRNTSLFSTLLCLGSAIAQNVSTTSTSSVPTNTPVPGDYSGALRPQVHFSPPRGFMNDPNGLFVDADGLYHVYYQNPTANVAGNQHWGHATTTDGYTFENQPIALFPPNNETFVFSGSAVVDVNNTSGYFPEQDNGVVAIYTLASSTLQTQNIAFSKDGGYSFEPYEGNPVIDIGSSQFRDPQVFWHSQTQNWVMTVVYASEFAVGIYTSPNLRNWTHASNFSNHGLLGIQYECPNLVEMPVEGSNDTMWLMFISINPGAPLGGSIAQYFPGSFNGTHFEAVDPVARIYDFAKDNYAGQFFSGVPGTEKRLSIDWASNWQYTNDVPTANEGWRSSMTVIRQNHLKQLPGIGWDLVSTPFNISSQFSQELAVNSSLGNSSILLDYSDVPSGAIYFEANVTGLTPDTLAGTLNFTFSSSVSNENVQGGTVPGGATWVSRRNTKWGAENPYFTDKFSASGVYSGSDNGTWTLAGILDRTILELFVNEGEQVATVTFFPEYPLDTLRIGARNLPEGADVSVAVWGLRDAWASQADSNGTVRGNITTSA

SEQ ID NO: 549 - protein, 545 aa, Unknown
  Description of Unknown: Fusarium beomiforme sequence
MRGFFLTIAGLVQLSTAQSSTSPAVPTGTPITGDYNGTYRPQVHFSPPQHFMNDPNGMFRDADGLWHLYYQYNPTATVAGNQHWGHATSKDLYHWVNQPIALSPPEEDTFVFSGSAVVDVNNTSGFFPDQDNGVVAIYTLSSPTIQDQAIAYSRDGGYTFTPYANNPVINSTSNQFRDPKVIRYNDSWIMVVAYPQDFKIGIFESSNLKDWTPTSNFSHHGLLGLQYECPNMIPMPYVDEDGKKQDDLWLMVISINPGAPLGGSITEYFPGTFNGTHFEAVDAAARIADFGKDNYAGQWFYGLSEDELPVSIAWASNWQYTSVVPTGNEGWRSAMSLPRENYLTKAKRVGWKLVSKPYDLSPVLGRELASNSSFGNGTLIVDYSDVESNAVYWEVNVTGIPDSGIPATSSMNWTFSSPITNENIKSGYYLGGDPVFFLDRGGVKGFDNIFFTDKTSLGSLATENGTWSLSGVIDRSIFEAFLNNGVDSVTNTFFSTEPLTLMVFSATDLPEDVKVSVKVHALESAWKEMENHDGLVAGNRTSSSS

SEQ ID NO: 550 - protein, 556 aa, Botrytis sp.
MFRLTSLAVTLLAAVSSAQETSSTSASFSTFTSDSSVPTDAPLPGDYTGALRPQIHYSPPQNFMNDPNGLFRDADGVYHVYYQYNPTQTVAGNQHWGHATSKDLYHWDNQKIALYPGNADEGIFSGSAVVDANNTSGFFPNQTNGVVALYTLNTPQSETQNLAYSFDGGYTFEKYAQNPVIPSTSTQFRDPQVTWFEDHWVMVVAYAQAFEIGIFTSPDLKDWTATSNFSHHGLLGLQYECPNLVRMPVANGTGDENMYLLAISINPGAPLGGSTTQYFPGTFNGTHFTSLDSAARLTDFAKDNYAGQFFSGIPADEDPIFLAWSSNWQYAQQVPTGELEGWRSAMSLPRRTHLANVKRTGWTLVQYPYDMTPLYNASKPLASSDNLENGSLIANYSSVPSGAIYISCKISNDNIAQGTLNFTFSSSSTRESISGGMNLGGDPTFWLSRRNLNGFAETNPFFTDRFSVDNTINDEGTLQLDVVIDRSILEVFVDAGRSSGTITFFPEGILDTVEVTAAGLNEGVIVDAKIWGLEGGWSTMANDDGIVYGNVTTPAN

SEQ ID NO: 551 - protein, 562 aa, Unknown
  Description of Unknown: Lasiodiplodia theobromae sequence
MRLSSAAAAATALVAGTNAQSSTSVYVQPDVPTGTPIPGDYSGALRPQVHFSPPQKFMNDPNGCFLDANGTWHLYYQYNPTATVAGNQHWGHATSKDLYHWENQQIAIFPPNNVSNIFSGSAVIDVNNTSGFFPDQDNGVVAMYTLNTPTKQIQEIAYSHDGGYTFIPYEGNPVIDSTSTQFRDPKVIWYEDHWVMVLAYSQEFAIGIFTSPDLKEWTHASNFSYHGLLGLQYECPNLVEIPVEGSDETMFVLTISINPGAPQGGSIMEYFPGTFNGTHFTAVDGAARIADFAKDNYAGQFFYGTPAGSDAISIAWASNWQYTQVVPTGDEGWRSVMSLPRRNYLAKIERVGWTLVSKPYDLSPVIGSELGSDDSLANASLVVDYSSVASNAIYFEANVTGLPGSVSDISSSATLNFTALSPISGESVSGGYFFGGDNPFWLDRGKTRGFDNPFFADKFSTAQLLDSSGTWSLSGVIDRSIIELFLDQGTYSATATFFPVQPLSIFSISTAGLPEGAKVSVAVWGLESAWAQYEDESGQVVGNVTTSSSAEKRMLYATSFDA

SEQ ID NO: 552 - protein, 577 aa, Alternaria sp.
MSSRLSVLAAIGGLLTFGHAQVSSNTTASATSISTYSQSDVPTGTPLPGDYDEPLRPQVHYSPPIGFMNDPNGMYVDEDGVYHLYYQYNPTANVAGNQHWGHATSKDLYTWTNQPIALFPGGPTEGVFSGSAVIDSNNTSGFFPNQTNGVVAIYTINVPENQTQHIAYSYDNGYSFTKYENNPVIVPGGTNPTQFRDPKVIWYEPTESWVMVVAYPVDFEVGIFTSPNLIDWTPTSNFSHHGITGLQYECPNMVEMRVENSTDSDESKYVMLISINPGAPLGGSITEYFVGTFNGTHFEADDARTRLTDFAKDNYAGQFFYGIPAEEDQVTLNWASNWQYTNVVPTAGEAVGDGFRSVMTVPRGHYLKDLPRQGLSLISYPSNIMSIVDSELASNDSLGNGTVFVDYSTVESGALYFEANVTGITGGPSLAGSISFTFQSSVSGESISGGTFISSGDVWLDRGKTDAFQSPYFTDKFTATGLYNEDDGSWRISGIIDRSIIEIFLNGGELSATSVFFPTQPLDTMMLRVSGLNETVTASVGVWGLQAAWLNQADENGIVAGNTTESGNSTAGAAKLL

SEQ ID NO: 553 - protein, 549 aa, Unknown
  Description of Unknown: Fusarium graminearum sequence
MRNNLLSTVVGLSQFYSVAIAQSSTTIAVPTGTPIAGNYNGTYRPQVHFSPPEHFMNDPNGMFRDADGLWHLYYQYNPTAVVAGNQHWGHATSKDLYHWVNQPIALFPPEEDTYVFSGSVVVDENNTSGFFPDQDNGVVAIYTLSSPEVQDQAIAYSRDGGYTFEPYKGNPVINSTSTQFRDPKVIRYNDSWIMVVAYPQDFAIGIFESSDLKEWTATSNFSHHGLLGLQYECPNMISIPYIDEDGKKQDDMWLMAISINPGAPLGGSITEYFPGHFNGTHFEAVDGAARIADFGKDNYAGQWFYGLSEDENPVSIAWASNWQYTQIVPTGDEGWRSAMSLPRENYLTKAKRVGWKLVSKPYDLEPVMGRELASNDSFGNSTITVDYSDVESNAIYWEVNVTGIPDFGISSTASMNFTFLSPVSGESVKAGYYFGGDPVYFLDRGNTHSFDNVFFTDKTSLASLAASDGSWNTSGVIDRSIFEGFLNGGVDSVTNTFFATEPLTLMIFSTSDLPEDVKVSISVYSLDSAWQKMEGKDGLVHGNTTSKAD

SEQ ID NO: 554 - protein, 573 aa, Unknown
  Description of Unknown: Metarhizium guizhouense sequence
MLPISTNIHTTLLGALYLANWCLGQNSTQYVGAHVPSGTPIVGSYGGQYRPQVHFSPPSHFMNDPNGMFRDQNGTWHLYYQYNPTKSVAGNQHWGHATSQDLYHWTNQPIALFPPKKNVYIFSGSAVIDKNNTSGFFGNQSNGVVAIYTLAEYLDDGSPGPQSQAIAYSYDSGFTFTPYDGNPVIPSNSSQFRDPKVVWYEDHWVMVVAYAQEFAIGIFTSPDLIEWTHASNFSNQGLLGLQWECPNLVRMPLYTEDGQRRDDMWTMLISINPGAPVGGSITEYYPGTFNGTHFEAVDSVARIADFGKDNYAGQFFFGVPDEEDPVSIAWASNWQYTQTVPTAQEGWRSAMSLPRRNYLTRIDRVGWKLISSPYDMQPIMGRNLAYNQSLVNGSLTVDFSDIASNAVYWEVNVTGLPKKGIPEMATLNFTLLSPITAEYIRGGYYFGGDNPFYLDRGGAKGFDNVFFTDKLSTNSLFRNGSWSMSGVMDRSILELFLNDGVDSATATFFATQPLTFLIISTSSLPHGTRVSTRVNALKSSWQQMEDPGDGLVHGNISMQETASEAMKHLLQSM

SEQ ID NO: 555 - protein, 580 aa, Unknown
  Description of Unknown: Cordyceps militaris sequence
MYWLQPICLASTLSLANICLAANTTSTSGNLSVSTYVDPNVPTGVPIVGEYDGRYRPQIHYSPPKHFMNDPNGMFRDDEGVWHLYYQYNPTGIVAGNQHWGHATSEDLYHWVNQPISLFPPKKTQYIFSGSAVTDPNNTSGFFPSQKNGVVAIYTLAEYGEDGSPGPQTQAIAYSHDGGYTFTPYQRNPVISSNSSQFRDPKVIWYKDHWVLVIAYAQEYEIGIFTSPDLKEWKHASNFSHTGLLTLQWECPNLVQMPYLDSNGKKQDDMWLLAISVNPGAPLGGSITQYYPGHFNGTHFAAVDNAARILDFGKDNYAGQFFYGTAEDEPPVFLGWASNWQYTQVVPTGEEGWRSAMTVPRRSYLTKAKRVGWKLVTEPYDLEPVMGSLLASNTSMVNGSLTVDFARVDSNALYWEANITGLPATGISESATLNFTFIAPQTGEFVRGGYYLGGDTPFFIDRGGAKGFDNVFFTDKFSTNSLTDGSSWRMSGILDRSILEVFLDGGIESATVNYFTTQPLTLMVVGTSSMPDGANVSVSVYALESAWAKMANERDGLVYGNQTGNGTACETKSRLFGIAL

SEQ ID NO: 556 - protein, 562 aa, Unknown
  Description of Unknown: Claviceps sp. sequence
MLLLSLDTGLHLAMSLLGALRLATAVHASPAPAGEVRVEKGSASGVAVVGDYTGPLRPQIHFSPPKGFMNDPNGMFRDGNGTWHYYYQYNPTGLEAGNQHWGHATSPDLYHWTNQPIALFPPKENVLVFTGSAVVDKNNTSGFFPNQTNGVVAIYTLAEYNDGVPGPQQQAIAYSHDGGYHFTPYERNPVIPSNATQFRDPKVIWYEDHWVLAVAYPDDFAIGIYTSPNLIDWTHASNFTGKGLLGSQWECPNLVRMPYYDRRGEREEDMWLLLLGINPGAPNGGSGAVYFPGSFNGTHFRAVDHVARIADFGKDNYAGQFFYGQPDDEEPVFMTWASNWQYTQIVPTDNEGWRSEAGLPRRNYLTKDVVDWKLVSIPYDLSPVMGETLLEKSLVNETATVDFSKVESNAVYWEANVTGIPESGVPATAMLNFTFANPASGDFIRGGHYFGGYMAFYLDRGGAQGFDDVFFTDKFSTNSLARDGKWSMSGVLDRSIVEVFLNGGIDSLTSTFYPKEPLTVMTIRSTDLPESMQVNIRVSALKSSWAAMAKSDRLVWGNQTVA

SEQ ID NO: 557 - protein, 564 aa, Unknown
  Description of Unknown: Claviceps sp. sequence
MLPLSLDTRHHLATFLLGALRLATAVHASTSTGGEIGVGEGYVSGYSLPVVGNYTGPLRPQVHFSPPKGFMNDPNGMFRDHDGTWHFYYQYNPTGLNAGNNHWGHATSKDLYHWTNQPIALYPPQQNLFVLSGSAVVDINNTSGFFPNQTNGVVAIYTLVERNNGVPGPQQQAIAYSHDGGYHFTPYERNPIIPSNSKEFRDPKVIWYEDHWVMAIAYSDDFAIGIYTSPNLIDWTHASNFTGTGLLGAQWETPNLVRMPYYNRRGEREEDMWLLLIGINPGAPKSGSGAQYFLGSFNGTHFSAVDGATRLPDFGKDHYAGQFFYQQSEEDEPVFMTWASNWQYTKVAPTDHEGWRSVMALPRRTYITKDAVDWKLVSIPYEMSPIMGETLLEESVVNGMTTVDFSEVESNAVYWEANVTGIPETGIPDNALLNFTFANPASGDYIRGGYYLGAYKDFYLDRGGAQAFDNVFFTDKFSINSFATDGEWSMGGVLDRSIVEIFLNGGIDSVTSIFFPKQPLTIMTIHSTNLLHSMRVNIRVCALKSSWTAMTASNSLVWGNHTVA

SEQ ID NO: 558 - protein, 559 aa, Unknown
  Description of Unknown: Hortaea werneckii sequence
MYSKSSILAALTFASSALGEFCSTTCTTAEVPTGTPVAGDYDGYLRPQVHFSPPKGFMNDPNGLHRGDDGIWHLYYQYNPTDTVAGNQHWGHATSEDLYTWTNQPIALYPVNASSYIFTGSAVVDENNTSGFFPNQTNGVVAIYTIATYEPIQLQTQGIAYSRDGGYTFTPYEANPVLDEGSPEFRDPKVIWYEDHWVMVIAFSQEFVMTIYTSKDLKNWTFASNFTRHGLLGEQYECPNLVRIPVDGQPGQYEWMMFVSINPGAPLGGSGSWYTLGDFDGYTFTPHTAEIHIPDWGKDAYAGQFFENTPGEAILINWASNWQYTNAVPTGPKEEFRSAMGQARRISIKEDPRLGPIAASEPYDMSPILGEELASDTFGNGSVVIDFADVYSNALMIEVNVTDLDVVAGSVNFTFLSPISGEYLTGGVLFNGNNDVWLDRSHINGFEYPLFTGKLSTAQIIEDRFSMQVVFDRAILETYIQGGLQASTSTFFPEEPLTILSVKAGGYGSGNVTTSVRVHALESTWRPQENRDGIVRGASVGNSTSRYDARQLAGGRFSR

SEQ ID NO: 559 - protein, 564 aa, Unknown
  Description of Unknown: Claviceps purpurea sequence
MLLLSLDTGLHLATSLLGALQLATAAHASPVPAGDFCVGQGDVFDYDVALVGNYTGPLRPQIHYSPPKGFMNDPNGMFRDGNGTWHYYYQYNPVGLTPGRQHWGHATSPDLYHWTNQPVALFPPAHNLFVLSGSAVVDVNNTSGFFPNQTNGVVAIYTLLERNDGVPGPQQQAMAYSHDGGYHFTPYEHNPIIPSNSKEFRDPKIIWYEDHWVMAIAYAADFVIGIYTSPNLIDWTHASNFTGTGTLGAQWETPNLVRMPYYNRRGEREEDMWLLLIGINPGAPKAGSGAEYFLGSFNGTHFSAVDGATRLPDFGKDNYAGQYFYQQSDDDEPVFMTWASNWQYTKAVPTGHEDWRSVTSLPRRTYLTKDAVDWKLVSLPYDMSPVTGETILEKCVVNETTTVDFSKVESNAVYWEVNVTGIPETGVAETALLNFTFTNPESGDYIRGGYYFGGYKDFYLDRGGAQAFDNVFFTDKFSTNSYATDGKWSMSGVFDRSIVEVFLNGGIDSVTSIFFPKKPLTVMTIVLTDLPQSMEVSLRVSALESSWTTMAGSDGLVWGNQTVA

SEQ ID NO: 560 - protein, 643 aa, Unknown
  Description of Unknown: Aureobasidium pullulans sequence
MSGERPREMSRSPSSSSQSTDITEPSLSEHTKTDPSASTPTFQRWRPAYHLQAPSGWMNDPCAPHYDPDTGLYHISYQSNLDPKNADWGDIAWRSATSTNLLDWNLQHEPRLSPDTHYDGKGVFTGCNVPSRDASLTYVYTSVSALPIHHTLPHPKGSESLSMAKSFDGGKTWQKYPGNPILPSEPTNLDVTGWRDPFVSAWPSMAAKLGLDPDNTLFGIISGGIRDVTPTTFLYSIDANDLTDWTYLGPLVNFGMNLRPSRWSGDLGKNWEVTNFLTLGDAHDATISRDFLVMGTEGCLPSALSSVSSSSTSPSPSRPLRGQLWMSGSLAAGRQDGSPSSSLVEMRYKFGGHLDHGCLYAANSFFDAKTAKHIVWGWITEEDLCDELRHDQGWSGLLSLPREIKLQTITNVVWARSSRLESITSIELEEDNYGTHTLRTLASEPVQSVVEQLRQRAVVRRARLSHPLPRRASYNLAFNSDDVQTTAWELDCSFRVSKRCSQIGLQIVHSRDFAQATTLSFEPSAETFTIERPSFRSSNSNAPINTAPERAPHTLFTTANPRKGTGHEEELLHIRGWRDNSVLEVFVNGRTAISTRLYAAEETIGIRFFADDDSVFGTSFSASSSSAGESQLIYATLWDGIEV

SEQ ID NO: 561 - protein, 605 aa, Unknown
  Description of Unknown: Bipolaris sorokiniana sequence
MPRVSVFSPPLVSETTLEPIERWRPRLHLVAPRGWLNDPCAPGYDPVNKKYHLGFQWNPNSTEWGNISWGAAVSHDLLTWKVSDHPSMQPSAQCDSGGVFTGCLVPTAIDGSENGVLTAVYTSVSRLPIHYTRPYFRTSEAVALATSTDSGRTWTRYANNPVLAEPPPGIDVTGWRDPFVAPWPCMDKLVNQQRVNRDTRSLYAVVAGGIRGKTPTAFLYRVDANALDAWQYLGPLIAPGLNFCPSPRWTGDFGVNWEVSNFVSLTSADGKICRDFLICGVEGRLATDDMIRTKGDFRATNAQMWLCGSLETAPGVHMKFRFGGRLDHGLYYAGNSFWDPQTQQQVIYGWIHEDDLNAEVRQRQGWAGVVSLPRVLKMQALAGVTGALSSPLQSVGSVELMPEDTNGSSFTVITLCAVPNPRLRKLRGCRFPSKETSGQSSGGVLVFPVAWPQWEMELDFRLEEGAAKLGFDIVHSAAEFTRVYFDANAETIVVDRSCSTSLDGIRTCQEEAPHTLFMIRQQAKDSPFAEKGILETLKFHVLYDSSVLQVFVNERTALATRVYPAGGTSTGIRPLVERASYQYSNTGGPKSRAWSIALWPLSLPV

SEQ ID NO: 562 - protein, 582 aa, Unknown
  Description of Unknown: Fusarium pseudocircinatum sequence
MTVKNTTPRPRWHPSPTYHLKAPRGWINDPCAPGYDPSTGTYHLSYQWNPKSCDWGDITWGHYTSRDGLTWKQNTQNPVLEPSEPYDDKGIFTGCLHPTGLQGEEGQLTVIYSSITNLPIHWTLPYTRNCAGLSVATSTDGGKTWQKSEQNPILEGEPEDLTVTGFRDPYLAEWPALDEMRGEASLYGFVSGGVVDGGPTVFLYAISPTDLTQWTYLGPLIDLPTGYSPSGRWGGDFGVNWECVNFMTLHNESEERPFMLMGTEGGVKPGAKEGSDQWSLWMAGSLEQTEQGPRIKPEYSGILDHGCLYAPNSYEHPITKNRIVWGWLKEDELTLARRESKGWTGYFSIPRELFLYTVENVTRTLSSSLADVGCIKATENGRGSNTVQTLGVRPLPDLQGLRRGKPGYWNNIDTNSNLGKLVDTHTGSWELEATIKVSPNDQGLGFWIRHNEDLSEGTAIHFSPQSEKITVDRSKSNHEADIEKDAVSGPFTLFYSDRNGSEELEKLHLRIFCDGDVLEVFANDRFALSTMVYADTRDCTGLSWFVEGNGASETVFESVKLWENMKEVVEVDEPVVYERSQL

SEQ ID NO: 563 - protein, 623 aa, Unknown
  Description of Unknown: Colletotrichum siamense sequence
MSSEQPSSPPFAHPESSGNSASEGGSCAHSRSTSVSEPDDGDVFLNKEDAFNKWRPKFHLIAPKGWLNDPCAPGYDRANDCYHIGFQWNPDTPEWGNIKWGAATSRDLLSWDVSVEPSIVPTEAEDQGGVFTGCLSPVELRPGEVTTFYTSARILPIHHTLPYNYGSEGLSLATSKNSGRTWDRHATPILPGPPTDLKVTGWRDPFVSTWPSMAKALGDSEETLYGIVSGGLLGQGPTPFIYRLDSEDITKWSFLSPLVSLPCNFSQSPRWSADHGANWEVTNFLSLQDPDDDRTHDFLIMGVEGLLATEKSRGRSDFDKDHGQLWMCGTIEAHEGQPRMKHLYGGPLDHGSYYAGNSFWDPKTNQRIIVGWIVEEDLPIELKRRQGWAGFLSVPRALKIQRLRRVTKSLVSSLEEISSIGIRQDGVQEGSDESTFEVTTLCAVPDDRLRGLRRSTNPIRSENGFIFPQGCSTLEVIVSFEISPQIQSAGLKFTFAGNNAQEATIEFDPSCERLTIRRDKSTKETGVVVVEETAPHTLFTYVEESDGNKRKQELLLLRVLFDVSVLELFANERTALTTRLYADVPRIAAIEPFIHQRDSSGSLPGTTSGALHEFTCWELGSGQ

SEQ ID NO: 564 - protein, 607 aa, Unknown
  Description of Unknown: Aureobasidium pullulans sequence
MASTDSHNGTFGRWRPRMHLIAPRGWLNDPCAPVYNASTGKYHLGFQWNPDGWDWGNIAWGAATSADLINWEVSETPSIAPSATEDKAGVFTGAVSPINLPRKGSRDHLTCFYTSAQGFNIHYSRPYERGSERLHAATSVDGGISWQRYLHNPILSGPPSHLSVTGWRDPYIFRWPRLDRTRGSAPGSNLYGIISGGIRNTSPTIFLYTINEADPTKWTFLSTLLEPGLNFSPTILGGDFGVNWEVANIITLEDQDRREFDILVVGVEGCKVEDETALAGPAPVPRAARSGRSQRWFCGVLQELSGNKTARMEHNFSGILDWGVFYAANSFYDPVSNQRVVHGWILEEDLSDELREAQGWSGFISLPRSLSMQTIKHVDATCTDVLEKVPGFTYSSDENGIFEVSTICCQPHSQLQTLRRGEPLSLNSMVARHSLDAMDAPRADLQIPGLPSWELDMSLSSDVDVQTFGIDIFHSPDHKSLTRILFEPAKSLITIDRSLSRDPDSTKSIKIHPEVAHHAFLSIRDKDTNNIRPENLDIKIFFDVSVLEVFVNSRTVITTRIYPESGKCYGISPFVINEKDVESCACMDRFKVWELNATTSGQRVEKQ

SEQ ID NO: 565 - protein, 600 aa, Unknown
  Description of Unknown: Pseudogymnoascus sp. sequence
MTQTQIEVKTTDLQIVQYHRPTIHITAPCWINDPCSPGYDPNTGLYHVFFQCNPYGTEWGNMSWVHVTSNDLLTWKSMPDQPALSPDKEYDRDGVFTGCFTPVTDVNNRQLTVFYSSVCKLPFHWSTLPYPRNAAGLALAASDDGGLTWTKSPKNPILQGEPQDVDVTGFRDPYIASWPTLDRLRGKNGKSFYGLMSGGIAGSGPTTFLYEIQPEDLAQWDYLGPLVDLSTGYQPSKKWGGNYGINWECTNFLTLESNSISREFLIIGAEGEVEREHIHSSVSSAATSPRTVRQQVWMSGNLVKKGDSIKLQFKFGGILDHGSYYAANSFTDPLSNKRIVHGWIPEEDCTDEHARRKGWNGALSIPREVFLLSIPNVISALNSQLSEITCVERQLELNGSTTLHTLGIRPISQMSRLRDSCLSSYQKNQIFLLRPDSIQQEHLTVTSFPTWELQATISVAAGCETVGFHLRHSNDFLIHTTVVFSLLAETITVDRSASTPYTDTNKFPEKGSFTLFKFRDPSNGKEEQERLRIRIISDGDILEVYANDRFALATMVYSYDYESNNGITAFATGLDNKAIIEKISVWDGLNGMEPLGHAQL

SEQ ID NO: 566 - protein, 573 aa, Unknown
  Description of Unknown: Fusarium sp. sequence
MTVKSCVPRSRWHPSPTYHLKAPQGWINDPCAPGFDTSTGTYHLSYQWNPNSCDWGDIAWGHFTSSDGLHWKHNGDRPILEPSESYDDKGIFTGCFYPTGLRGEKGQLTVVYSSITNLPIHWTLPYTRDCAGLAVATSDDGGKTWKKSDQNPVLRGEPEGLDVIGFRDPFLTECPALDELRGEKSLYGFMSGGLVKGGPTVFLYAVAPDDLTKWTYLGPFVDVPTGFRPSGRWSGDFGVNWECVNYMTLHNESEEAQFLLMGTEGGEKPGVKDRSGVWSLWMAGALENTSEGPKMKHDYSGILDHGCLYAPNSYEHPVTKNRIVWGWLKEDELTLTRRESKGWTGYFSLPRELFLYTAENVTRGLKSSLQDIQCVKIMDDGSQGKAKRVQTLGIRPLPNLETLRLGEPAFWSNLATKNKSGKLLETQSASWELEATINISASQQRLGFWIRHDKDATQKTAIYFSPEKEEIVVDRAESNQETDIKKDVASGPFTLFYLDRNGTEELEKLRLRIFCDGDIVEVFANDRFALSTMVYADSKECTGISWFVEGEGSEGTVFESIKIWENMSKVILS

SEQ ID NO: 567 - protein, 584 aa, Unknown
  Description of Unknown: Fusarium euwallaceae sequence
MSVTTTCTAAPAQKPHHFHPQPEYHLKAPQGWLNDPCAPTFDPTTGTYHIFYQWNPQSCEWGNICWGHATSPDGLLWKQVTTNPALQPSEPYDNDGIWTGCLWPTGPKGEKDQLTVIYSSITSLSIHWTREHIRGSEGVSLATSTDNGKTWRKSDLNPIIKNEPEDLRVTGFRDPFLGTWPALDEIRGEKGLYGILSGGIADKTPTVFIYAVSPTDLTEWKYLGPLVDLVPRFRVPGPWTGDFGINWECVNYMTLRSDTEERDFLLMGTEGGFKSDCKERDPDNLFAWCLWFAGSLKQTAEGPKLRHDLDGILDHGTLYAPNSYEHPVTKKRIAFGWIKEEELTLARREAKGWTGYLSLPRELFLYSARNVVRGLKSSLDEIRSIKAIPDGEGVNTIHTLGIRPLDDMRLLRPSRPDEWSAIGGSDTSGILKYRTRSTSWELEALINAHAQRVGFHICHNADTSLRTSIFFDTQEEKIVVDRSASNHEPDIRKDTLSGAFTLFYSREQGRETLEALKLRIFRDGDTLEVFANDRFALSTTVCVHETCGGISWFVEGGGDAEGVFEMIRLWDGLGQEDGRGLGEC

SEQ ID NO: 568 - protein, 593 aa, Unknown
  Description of Unknown: Verticillium dahliae sequence
MSLVTTRTTAHEASTQARLPLKHHAPSYHLKARGWMNDPCGPGYNPITKTYHIFYQWNPYGCEWGNMSWGHATSQDGLRWTHAPSGEPALKPSEPYDKEGIFTGCFWPTGPHGEKDQLTVVYSSIAALPIHWTLKHIRNSEGVSLATSTDAGKTWQKSDLNPILVGEPEDVEVTGFRDPFLAEWPALDRIRGEKSLYGFLSGGVVGKGPTVFLYAIQPDNLTEWKYLGPLVDLAPGFRAPGSWTGNFGVNWECVNFLSLQDGAHEQDFLLMGTEGGVKPRYKEGDEEPLGQWSSWFSGSVEQTAAGPRLRHEFDGVLDHGSLYAPNSYVHPETQKRITIGWVREDGLPMSRCKARGWTGFLSLPREVFLSTTHNVTRGLQSPIEDIRSFKILESGSGGKTVKTLGIKPMDDLRTLRPSRPAEWSSLGRTSAAGILRERTRNQSWELDAVITVDPRQRRVGFNICQSPDGLQRTTVYFTPQTEQIVVDKSLSNTEADVDKSLLDAPFTLLYSLENGTEKLEKLRLRIFRDGDVLEVFANDRFALTTTVYCDDSCAGISWFLDDEGSHSVFDSVQLWEDMAGTQGQVPEIGQPHL

SEQ ID NO: 569 - protein, 594 aa, Unknown
  Description of Unknown: Fusarium oxysporum sequence
MAYQLQQTWKSRFERPRIHFTANSWINDPCAPGYDPWTNTYHVFYQCNPSSCEWGNMSWGHLVSRDLLTWTPASFSPVLVPDQIYDSEGVFTGCWVPATNANDKTLRVAYSSVKHLPFHWSTPPYPRHAAGLALATSRDGGITWEKSPRNPILPGEPDSLNITGFRDPYVTAPLSIHHSDPAKLYGLISGGIQDLGPTTFLYEISQENLEDWKYLNPLVDVPLRFQPSDKWSGNYGINWECTNLVTLCAGDVSRHFLIIGAEGDVEKEQVKKDNGPPGVPSRTIRTQLWMSGHLTTNDEGIIKFRYEHGGFLDNGPYYAANSFWDPIGNRRIVHGWIPEEDITEDAAKAKGWNGSLAILREVFLLRIPNVKGTCRSELSEIYPFERLAEPDGSTTVLTLGVRPIREMARLRETSARITELESTVMLPGPDTATSRTIARTQSPSWELEAEIAVHPGCQSVGFHLRHSNNLSIRTTLTFCIAKETILIERKTSNDDQTINKCPDAGPFTLLALTRPDAGDEVIWEKLRIRIFSDGDILEIFANDRFALATMVYSENYGPDMGGITAFATGEINSASFETVKVWDGLDVKYIVRET

SEQ ID NO: 570 - protein, 577 aa, Cryptococcus sp.
MSNSSGRPQYHFVAPRGWMNDPCAPGYDPQTHIYHLFYQWNPKSHAWGNISWGHATSRDMVHWEHMSTEPVISPDQPYDSHGVFTGCFYPRGPSGQDDQNSVFYTSVNYLPITWNQPYKRGCEGLAMAVSKDEGITWTKQDHNPVLAEEPPDIHVTGFRDPFLAPWAAMDKLRGSGRTLYALISGGIHGHGPRTFLYAIDPTDLTKWTYLHPLIVDLPVNHVPSSKWAGDFGANWECTNFVTLHGDGGRVRELVFAGAEGGKERPWVEDYHTSHGAAARRIPRYSNWLFGRLGLKESENEVRMSVDIAGLLDWGIFYAANSFKAADGRTVLWGWLIEEDLTDFELAKKGWTGCLGVPREIFLNTEHGVVGALVTKLEAIKSVEVIDDAIRPSSGSTVLTLGVRPIQEMKSLRKAVLYEYLPGPLKAHRTVLPAASLTCEIQAIVHVFESTESVSLVLRHNDDQSIRTSIVFRPGDEILTVEREHSTSRDDVNTCPEVGSHTLFRLRSKGATENSIEPLRLTVLLDHDVIEVFANDRFALSTRVYTAPEHTGLSLMSKGGGWVEDFRVWEMGGIGLQD

SEQ ID NO: 571 - protein, 658 aa, Unknown
  Description of Unknown: Fusarium mangiferae sequence
MVTLDSPILVQLPPKRHIYENAVYEVPYNTTSTASHNDVLHDQDPLATAKALETHIENARRRWRSRYHLMPPTGWLNDPCAPGYDGAHDVYHVGFQWNPKKPEWGDISWGSALSKDLITWEISGSPSIRPSKKHDGEEGVFTGCWSPVPSASGRSTAFYTSARMLPIHHTLPYNWGSEAICIATSDDAGRTWQRRDVSTVLGGPPRHLDVTGWRDPYVARWPSLSRLLGHGSDQSLFGIVSGGIRGIGPAIFVYSLEQYDLAAWNFLSVLTITSSPLTQHPSQWEPDYGTNWEVVNFLSLPDPDDPTISHEVLMIGVEGRKQLGTKPSERHCHSEFRKDHGQMWVSGPLVQTSTGMQMQFLSGGALDYGAIYAVNSFHDPRSNQQVAFGWIVEEDLSAELKREQGWAGLLSVPRIVQLSRIRHVVKALKSDLTSIKSFDVVPEEKPQQKSLSPTNSPQAYTVTTVCALPDPRLNKLRQSQWFMGPIAYHTLPEVLGSLEFLLGCSCWELDVSFDIGNDVQSVGFIIGHTKDSELRTIVSFSPDLEMLKIKRAKSTNMAGVCVADEEAPHTLFSTLSPGTAAGAEQFLSQEPLRLHAFFDVSCLELFANERTAITTRVYPESMTCYNIQPFVVKKGEHPWSGQLLECTAWELKTSCFEG

SEQ ID NO: 572 - protein, 617 aa, Unknown
  Description of Unknown: Monosporascus sp. sequence
MKLPSAAAAGSLVARQAIDYNSAPPNLSTLANASLFETWRPRAHVLPPFGQMGDPCMHYTDPETGLFHVGWLYSGASGAAGATTDDLVTYHDLNPDGRHFIVAGGKNDPLFVFDGSVIPSGIDGKPTLLYTSVSYLPIQWTVAYVRGSETQSLAVSYDGGRNFTKLEQGPAIPSPPFAVNVTGFRDPFVFQNGQLDTLLDSVPGTWYTVISGGVHGEGPSEFLYRQHDPDFQYWEELGQWWHEPANSSWGSGDWAGRWGYNFEVANVFSLDEQGYNSEGEVFTTVGTEWSLDPIVPQVSDFREMLWAAGKVSLENGQVKFTPTMAGYLDCGKSAYAAAGKELPASSVASQKSGAPDRFITHLWLTGDFYGTAKFPTPQQNWTGALLLPRELSVGKIHDVVDNELVHETGSWQAASKRPGVTELTTLKQVIAREALAALTSGKSFTEAERKLDSACVVPFERVPESKFHVITASLSFPKGSRGSDLRAGFQILSSEHESTTIYYQFSNESIIIDRTNTSAAARTTNGIDSRNEAGRLRLFDVLRDDEERIETLDLTIVVDNSIVEVHANDRFAVSTWARSWYAASREIRFFHDGEGEVTFGNVTVHEGLYDAWPDRST

SEQ ID NO: 573 - protein, 632 aa, Pseudogymnoascus sp.
MKLSLVGAVVAVVAVGAGATTSSVVSQRTKGQHHSIDYNHAPPNLSTLASGSLFNTWRPRAHVLPPSGQIGDPCMHYADPNTGLFHVGWLHGGASGATTDDLVTYRDLNPDGRPFIVAGGVNDPIAVFDGSVIPTGIDGKPTLLYTSVSYLPIQWTIPYTRGSETQSLAVSYDGGRNFTKLHQGPVVSSPPFAVNVTAFRDPFVFQNAKLDSLLESSPQTWYTVISGGVHGNGPSQFLYRQHDPDFQYWEYLGQWWHEAANSTWGNGDWAGQWGFNFEVGNIFSLDKNGYNAEGEVFTTIGAEWSFEPIVPEVSDSRQMLWAAGNVTLQDGAAKFTPNMAGFLDWGSSAYAAAGKELPATSQASIKSGSPDRFITYLWLTGDFYATHNFPTLQQNWTGALLLPRELSVGTISNVVDNELSRETGSWRVASTNSGVLELATLKQEIAGETMAQLTSGASFTESGQTLSSPGPVAFQHCPKSKFYVLTASLSFPSSARGSDLKAGFEVLSSEFETTKIYYQFSNESIIIDRTNSSAASSTTDGIDARNESGKLRLFDIIEHGEERIETLELTIVVDNSIVEVHANGRFAVSTWARSWYTASKEIRFIHDGEGEVEFANVTIHEGLFDAWPERSN

SEQ ID NO: 574 - protein, 618 aa, Unknown
  Description of Unknown: Fusarium bulbicola sequence
MKFSLFLTAGSLAWAKPSTPKLDYNRAPPNLSTLANLTIYNTWRPRAHVLPPTGQIGDPCMHYTDPKTGLFHVGYLHEGAAGATTDDLVTYRDLNPGGAPFIRAGGLNDPVAVFDGSVIPKGINGTPTLFYTSVSYLPIHWTINYTRGSETQSLAVSKDGGRNFTKLRQGPAIPAPPFALNVTAFRDPFVFQNQDLDSLLESESGTWYSVISGGVHQKGPSMFLYRQYDPEFQYWEYLGEWWHEKANTTWGDGLWAGRYGFNFEVANVFSIDEKGYNSDGETFLTFGAEWQENPIVPQVSSFRDMLWAAGNISLDNGKPKFTPSMVGKLDWGRSAYAAAGKYLPSDSKASSKSGAPDRFISYLWLTGDYYGDLKYFPTPQQNWTGSLLLPRELTVGKINNVVDNELSREEGSWRVERNESGVLELATLKQVIARETMAAFTKKTSFVEPGRNISKAGSTTFDRNPKSKFYVLKSSISFPKSARGSDLKAGFQILASEKESTTIYYQFSNESIIIDRSNTSAAALTTSDIDARPEAGRLRLFDVLVDDEEKIETLDLTIVVDNAIVEVHANDRFGVATWARSWYADSTNIRFFHKGSGEVSFSNVTIYEGLADAWPERK

SEQ ID NO: 575 - protein, 619 aa, Unknown
  Description of Unknown: Fusarium euwallaceae sequence
MKPALLLTAGSLAWAKPSGYKIDYNRAPPNLSTLANYSLFETWRPRAHVLPPFGQIGDPCMHYTDPKTGLFHVGWLHLGAAGATTDDLVTYHDLNPDGAPFIRAGGTNDPIAVFDGSVIPSGIGGKPTLLYTSVSYLPIQWTINYTRGSETQSLAVSKDGGRNFTKLQQGPVIPSPPFALNVTGFRDPYVFQNSRLDSLLDSEPGTWYNVISGGVHGKGPSMFLYRQYDLEFQYWEYLGQWWHEKANSTWGEGLWAGRYGFNFEVANVFSLDEEGYNSKGEVFATLGAEWSLEPIVPEVSDFREMLWAAGNVSLEEGDVKFSPTMVGKLDWGHSAYAAAGKVLPSSSKASSKSGAPDRFISYVWLTGDYYGTLKQFPTQQQNWTGSLLLPRELSVGKISNVVDNELAREKGSWRVARNESGVVELDTLKQVISRETLSNLTKKESFAEEGRTISKPGSTAFKRHPKSKFYVLKTSISFPSSARNSSLKAGFQILASEHESTTIYYQFSNETVLIDRSKTSAAARTTSDIDSRNEAGRLRLFDVVEKGEERIETLDLTIVVDNSIVEIHANDRFSLSTWARSWYSDSTEIRFFHDGEGEVTFGDVSIYEGLFDAWPERKR

SEQ ID NO: 576 - protein, 659 aa, Unknown
  Description of Unknown: Hortaea werneckii sequence
MRGLPSIAPLATVLARQDGTASGTIDRNAAPPNLSTLANNTLFETWRPRAHVLPPTNHVGDPCMHYTDPETGLFHVGYLYSNDDISGAAGATTDDFVHYRDVKPDVPVFIEPGGKNDPVAVFDGSVIPRGINGTPTLFYTSVSFLPIHWTIPYTKGAETASLAVTYGNGSNFTKVNHGPSIPGPPYGSNALNVTGFRDPYVFQSPRLDALLDSDDGVWYNVISGGVHDVSATQFLYRQVDPEFRDWEYLGQWWSEEPNSTWGDGTWAGRWGFNMEVANIFTVDETGYDDGGDLFITLGTEWGYAPVEPQTSPQRNMLWASGTLSKNGTQHGWDHDSWGAWGHGKDDSEVKFQPNMAGFLDWGTSSYAAAGKYLPASSQASQQSGAEDRFISYVWITSNHFGDLDFPDDQQGWDGSLATPRELTRGTISNVLDNELVHETASWRVDSKSSTGDTVELVTLHQKIIREAWDAYTQNATNTITQAGRTVEQSSQSNTVAFDKSPSSKFFVMTASINFTEQARGNNSDVKAGFKILSSEHEETIIYYQFSNETLIIDRSNSSAAALTTNGIATTNEVGKLRLFDIQCEGEQEAHVETLDLTILVDNGIVEVYANDRFVISTWVWSWYASSNNVAFFHEGSQAVKFGNVQIYEGLADAWPERSR

SEQ ID NO: 577 - protein, 626 aa, Alternaria tenuissima
MKRSSTVLASLAALTTSHIIPRQESIDYNAAPPNLSTLANSTLFDTWRPKAHVLPAFGQIGDPCMHYTDPETGLFHVGYLHLGASGATTDNLVTYRDVNPDSEPFIRAGGINDPVAVFDGSVIERGVNGTPTLLYTSVSFLPIQWTIRYTQGSETQSLAFARDGGSNFTKAEFGPVIPSPPFAVNVTGFRDPFVFQNSQVDGLLGKRNGTWYTVISGGVHGKGPSLFLYAQYDDEDADLFQTWEYLGEWWHEAANSTWSQTGWAGRWGFNFEVANYFALDEQGANEEGEIFATIGAEWSYEPIVPQVSDNREMLWVAGKQELVDGQLKFEPTMSGRLDAGRSAYAAAGKVLYADSQASKASGAPDRFITYLWLTGDFYGTLTDEFPTAQQNWTGSLLLPRELSVGRLNVVDNQLSREKGSWRVDQEHDNGTVTLATLHQKIAREPYAAFQDNATNVITQTGGSMASVMKFDESPKSKHWMMTASITFPSRSDSLRAGFTILSGSQESTNIYYQFGNESLIIDRSNSSAAAQTTDGFLTEIETGKFRLFDVAGGYGNETKVETLDLTIVVDGGVVEVHANDRFAISTWVRSWYADSRDISFYVEGGDATFSNVTIYEGLVDAWPERN

SEQ ID NO: 578 - protein, 684 aa, Unknown
  Description of Unknown: Rhizoctonia solani sequence
MPHMAPHYQPHPYRRALLFAVTAAACSSARGSSWPEIMSRANEIDFSSAPPNLTTLGNNSLFTHWRPRAHFIAPNSWMNDPMTLWYKADGEGGGKFKASYQAHPHHVQWGNISQASAASDDLIHWKDVPSWKDDRLTLYPSQPNDRLGVFDGTMIPKGYKGFPTLIYTGVKYLPTGWSIPYTPGTETQNLAWTEDGGVTWKKLETNPVMGGPPEGMNVTAWRDPWLFQSPTIERLTASNPGVPVPPTTFNGTAPNVTNVTIKDPWFATVSGGEKGVGPHLLLYRQASEDFTKWVYLGQIFQHAGNYSWSEWSGNWGWNFEVSTVVRLGTEGDQPGAGGRDFICMGTEGGRPEGWSNHWPLWVKGNYSDAAQLVPEYAGVVDWGETYAFMSFPVPRKKGSKDYKNQPTRQVLFGWTYEDDNNYGLLAKGWNGAFTLPREMFVKKWTVRDSRAEERGAWGIVSRSGSSYDLETLGTRPAEEVDALMNESKTKWSEKGWTYSASGSSNGTWRAFSKQPTSRFYVLSATLTFNTSSDAQAGFTIFRSPDGSEQTHIYYDFAAEAIRVDRSKSSLVTGFNLNPEAGKLRLWNVPSGKGNGTRLETLELKVFVDNSIVEIYANDVFAMTTRLYPWRDDSNGLGYYASGSSNVKYSDVKVWEGLTNAWPERPANSSNKLVWDGPNMPWAGW

SEQ ID NO: 579 - protein, 702 aa, Unknown
  Description of Unknown: Aureobasidium pullulans sequence
MHPTLALTVACLPAALVAASNISSNGTTVPDFHLPPQNLTIYGNNSLFAKWRTKARFRPSSNHIGDPTAFWQDEQGVFHVSGLYSYLRGPNISITSSIGSALTSDFLSYVDAHNYTNSSLFVNGVSIGPGNENDPLAVFDGSVIPKGYKGLPTLIYTGVHYLPISWSKPYIKGSEVQTLAYSEDNGATWIKLDIEPVIPGPPEGFNVTGFRDPWVFQAPQFAKLLNDTPETWYLSVSSGIRQVGPRLLLYRQNTSDFTSWEFLGPSVSAPVNTTFSAGNFSGNDGSNYETSNTLFLDENGENLEDGVNFVTMGAESGRETHSFHYSLWKMGKFVRSSVNESVILEDHATGVIDWGIGYACTTMPDYKTNRRLAFCWSNDDFNSTISEQVGYRIGSSGVYSIPREVYYKEIPGVVADDLAAENGYWSVATEYLNTTLAKDGVALAKANGNDTVILATLGCKPAREILGFRKHANQSWTESDFDVDVKSIKSNCSGVEFTKEEGVTRAFIPFQQSPHSRHWELQATVDIPESSLRNEEYEDFAAGFNLLHSSASAPSNYSVDDAAMLYRPSNETFMITREVALGRDNVNTDPEMGKLRLWNISSTNTESKQSYAIQSLNIRAFMDGSFFEVYVNDVLTISTHLYYWYKDSTRMGFYLQFPDTLANSTLDTGVKFSNISVWEGVPNVFPKRPTKPAELIDNGVGF

SEQ ID NO: 580 - protein, 665 aa, Unknown
  Description of Unknown: Phaffia rhodozyma sequence
MIAPLLKTLPFLAAAYAAELDLPNFSALNRRQDNSTSSSAGCSLDQTVAPGNLTLCGNATLFTTFRPKARFIAPEGWMNDPMGLYQRADGSIHAGYQSHPKHIQWGNISQGAAYSSDFTSWTDFNGSEGYKTIWPSQIYDIRGVFDGSIIKEGIDGYPTILYTSTSFGPLGATLNEAEGTETQSLAYTTDDGASWIKLGYGAGQNPVIYEWPETNLTGFRDPYVFQSPRLEALLANTTSITNATGDHFATISGGVHGDGARLFLYRQHTTGEFIKWTYLGPLVTTGYKESYGEWSGNYGINFETAGVTRLNPAGAAWDNGSDTTAVDFVTFGTEQGRADHQNHWPLWAAVDYEVRDNGSIEAVIAYSGVQDWGRSYAYASFPVEGYRQVSVGWIYEDDDNVILAKQFGYQGAFTLFRDLFVKVVENVSPSTPGLFEQASWSTKNSTDGMSVTVTTLGQRVVPETLAAYKGNSTVSTLAPVMLNESAAAYTPFSSQPTDRFYALTGSFEFGLNTTAKAGFRVLASEEEYTDIWFDPASENLTVVRTASSLIKSFGNDTELAKVKLYEIVGAESKTLNLTVFVDGSVIEIYANDEVALSTRAYPWLANSTGAGLLADGTTAGDVVGVSGLELWDGLVDAWPARPANTSQGLVWDGPTAAMYGLFAGY

SEQ ID NO: 581 - protein, 501 aa, Paenibacillus polymyxa
MTEAQVNESFFEGDEYMNVIRQEKYRPSYHFSPKSGWMNDPNGMVYYEGRYHLFYQHHPFGTTWGPMHWGHAVSTDLMNWEEQPIALEPDELGTIFSGSAVVDEQDTSGFFGGKPGLVAIFTHHASLPGTEQVRQCQSLAYSTDSGKTWIKYTGNPVLEDKECIDFRDPKVFWHKPTEQWVMVLACGQTIRIYHSPNLKEWTFASEFGHGIGSHDAVWECPDLFPLYIDEKREQVKWVMLVSIGDVPEIREGSRTQYFTGEFDGTTFVADAESEKVRWLDYGRDNYAGVCWSDIPAEDGRRLFMGWMSNWRYANQTPTERWRGAMSIPRELALETRKGTVALVQRPVRELEGLRTPVLSLTEPSWEEVRNALSALQLDCYELVAEFATTGDFGFKVRVSDEQETLVGYTSATQEVYVDRKRSGRSDFHEDFAGKHGASLTILPDRMDIRIYVDRSSIEVFFDRGQVAITDLIFPDAEAKGLEIFSAEEQITVFSLELYALK

SEQ ID NO: 582 - protein, 485 aa, PaeniBacillus sp.
MNVIRQDKYRPSYHFSPKSGWLNDPNGLVYFEGRYHLFYQHHPFGTTWGPMHWGHAVSTDLVTWEEQPIALEPDEHGMIFSGSAVVDEQDTSGFFGGRPGLVAIFTHHDSPPGTGQVRECQSLAYSTDSGKSWIKYADNPVLEDEHCLDFRDPKVFWHKPTEQWVMVLACGQTIRIYHSPNLKEWTFASEFGHGIGSHDAVWECPDLFPLHIDGKRAQVKWVMLVSIGDAPTIREGSRTQYFTGEFDGTTFVPDVDSEKVRWLDHGRDNYAGVCWSDIPVRDGRRLFIGWMSNWRYANLTPTERWRGAMSIPRELTLETRQGKVALIQRPVRELEGLRTPVLSLKEPSLTEIRAAFSALQLDCYELVAEVATGGDFGFKVRVSDEQETLVGYASETQEVYVDRTRSGCSDFHEDFAGRHAVPLEAVENRLHIHIYVDRSSIEVFFNHGQVVITDLIFPDATSKGLKIFTADERITLYSLELYELK

SEQ ID NO: 583 - protein, 493 aa, Paenibacillus odorifer
MSTIAKQNYRGVYHFSPKEKWMNDPNGMVYFEGEYHLFFQHHPGGMTMGAMHWGHAVSKDLVTWEELPIALAPDELGMIFSGSAVVDWNNTTGFFEDKPGLVAIFTHHLDMPEGKPAIQRQSLAYSKDNGRTWTKYDGNPVLEHDTFIDFRDPKVFWNKDTNQWVMIVACGQTVCLYHSPDLMNWTFASEFGEGIGSHDGVWECPDLFPLAIDGDPSNTKWVMLVSIGADPAFVEGSRTQYFTGDFDGEVFTPDEDSIKVRWLDYGRDNYAGVSWSDIPAEDGRRLFIGWMSNWMYANKTPAEEFRGAMTIARELQLESRQGGTFLVQKPVQELESARVQVLSVKEATVQEINTLLKEIHLESYEIIAEFARGKSVGFKVRIGADEQTVIGINGETEELYVDRKASGQHDFHEHFVGHHSAKLAALDESNDLRIYVDRSSVEAFSNRGQAVITDLIFPGLESKGIAVFADNENDLLISLDIYELTLSAEQDKN

SEQ ID NO: 584 - protein, 493 aa, Paenibacillus sp.
MSTISTTDYRGVYHFSPKEKWMNDPNGMVFFKGEYHLFYQHHPFGTTWGPMHWGHAVTKDLVTWEELPVALAPDEHGMIFSGSAVVDWNNTSGFFDDEPGLVAIFTHHQEVPNDHPIQRQSLAYSKDSGRTWMKYEGNPVLEHESFVDFRDPKVFWHEQTKEWIMIIACGQTVCLYHSPNLKDWTLGSEFGAGIGSHDGVWECPDLFPLAVDGDASQEKWVMLVSIGADPAFKEGSRTQYFTGDFDGITFVPDEASHTVRWLDHGRDNYAGVSWSDIPAEDGRRLFMGWMSNWMYANQTPTEAYRGAMTIARELTLEKRDGEVLLVQRPARELEQARTPVLSLQNASIRQVSEQLNTLRLVNYEIYAEWASDQSVQFALRSGSNNETLIGVDATQNEVYVNRSRSGISDFHEHFLGRHAAGLKAVVGNQHMRIYVDYSSVEVFANDGQAVITDLIYPDADSKGISVQSENKDVVFASLHIYELSPIRVEGQSE

SEQ ID NO: 585 - protein, 498 aa, PaeniBacillus sp.
MSAITKQKYRGVYHFSPQAKWMNDPNGMVFFEGEYHLFFQHHPGGMTMGSMHWGHAVSKDLITWEELPIALFPDELGMIFSGSAVVDWNNTTGFFEDKPGLVAIFTHHLDMPEGKPAVQRQSLAYSHDNGRTWTKYEGNPVLEHDTFIDFRDPKVFWHQETKQWVMIVACGQTVCLYHSPDLIHWTFASEFGEGTGSHDGVWECPDLFPLHVDGDTANTKWVMLVSIGADPAFVEGSRTQYFTGDFDGAVFTPDEDSEHVRWLDYGRDNYAGVSWSDVPEEDGRRLFIGWMSNWMYARQTPAEEFRGAMTLPRELYLESREGKILLVQKPVKELEVVRTPVLSLKDVTVQEINASLADLQLDAYEIAARFTRGMSAGFKVRAGAGEQTVIGIDAKAEELYVDRQTSGRLDFHEWFPGRHSAELQAPGEINDLRIFVDRTSVEVFSNGGQAVITDLIFPKPESAGVAAFAENEETPFLSLEIYKLNLPAADGDNQQSEG

SEQ ID NO: 586 - protein, 490 aa, Paenibacillus xylanexedens
MSTILKQDYRNEYHFSPKEKWMNDPNGMVFFNGEYHLFYQHHPHGTTWGPMHWGHAVSRDLISWEELPIALLPDENGTIFSGSAVVDWNNTTGFFEGEPGLVAIFTHHLEVKDRDAIQTQSLAYSKDSGRSWTKYEGNPVLKHESFVDFRDPKVFWHEQTKEWVMIIACGQTVCLYRSPNLKNWTLGSEFGAGIGSHDGVWECPDLFPLAVDGDSGQVKWVMLVSIGADPAFIEGSRTQYFTGDFDGTTFVPDEASHTVRWIDYGRDNYAGVSWSDVPEEDGRRLIIGWMSNWMYANQTPTNNYRGAMTIARELTLETRAGEVILIQRPAREIEQARTPVLSLQDASIQQVSEQLNALQLVNYEIHAEWAPNQSFHFALRSGANNETLVGADANRGEVYIDRSRSGIGDFHEHFLGRHAAELKEVNGNQSLRIFVDHSSVEVFANDGQAVITDLIYPDVDSKGISVHAENTDLLFSSLHIYEISPTKAKD

SEQ ID NO: 587 - protein, 498 aa, PaeniBacillus sp.
MSVITKQNYRGAYHFSPQEMWMNDPNGLVYFEGEYHLFFQHHPDGMTMGEMHWGHAVSRDLVAWEELPIALVPDELGMIFSGSAVVDWKNTTGFFEDKPGLVAIFTHHLNMPEGQPAIQCQSLAYSKDNGRTWTKYAGNPVLRHETFIDFRDPKVFWDKEQSRWVMIVACGQTVCLYHSPDLIRWTFASEFGGGIGSHDGVWECPDLFPLAVDGDKDNIKWVMLVSIGADLAFEEGSRTQYFTGCFDGAVFTPDEESRSIRWLDYGRDNYAGVSWSDLPEEDGRRLFIGWMSNWMYADQTPAEGFRGAMTIPRELALESRNGVVTLIQKPARELEAVRIPVLSLTNASVQEVNAACASLQLDAYVIEAEFARGTSAGFRVKAGAKQQTVVGINGQTEEMYVDRSASGKIDFHKLFPGLHSAKLTAQAATYDLCIYVDRSSVEVFGNGGQAVLTDLIFPEPESGALTAFVELEEDLFLSLKIYDLVSSAASGRTGKQEV

SEQ ID NO: 588 - protein, 493 aa, Paenibacillus amylolyticus
MSTISTTDYRSTYHFSPKEKWMNDPNGMVFFKGEYHLFYQYHPYGNTWGPMHWGHAVTKDLFTWEELSVALAPDEHGMIFSGSAVVDWKNTSGFFDEEPGLVAIFTHHLEVPNDQPVQRQSIAYSKDNGRTWDKYKGNPVLQHESFVDFRDPKVFWHEQTKEWVMIIACGQTVCLYRSPNLKEWTLGSEFGAGIGSHDGVWECPDLFPLAVDGNNEHIKWVMLVSIGADPAFKEGSRTQYFTGEFDGSTFVPDEASHTVRWLDHGRDNYAGVSWSDIPAEDGRRLFMGWMSNWMYANQTPTEGYRGVMTIARELSLETINGKITLVQRPARELELARRPILSLQNVTVKEARTHLTNLQLESYEVDAKWISEQSVHFKLRSGANHQTVVGIDASRQEVYVDRERSGIVDFHEHFGGRHAASIQSENGDHHLRIYVDSSSVEVFANGGQAVITDLIYPDAEAKRITVDAGDDNVVFSSLNIYKLTPVKVVINEK

SEQ ID NO: 589 - protein, 489 aa, Paenibacillus lautus
MTNTEQQNYRNAYHFSPQKNWMNDPNGMVYFNGEYHLFYQHHPFGTTWGPMHWGHAVSKDLVSWKELPIALAPDEHGTIFSGSAVVDWDNTSGFFDEEPGLVAIFTHHHDVPGAQQMMQYQSLAYSKDEGRTWTKYDGNPVLSHDSYVDFRDPKVFWHEPSSQWVMIVACGQTVCLYRSSNLKEWVFASEFGEGIGFHDGVWECPDLFPLATEDSGVRWVMLVSIGDDPAFVEGSRTQYFIGDFDGTTFMPDERSKGEVRWLDYGRDNYAGVSWSDIPAADGRRLFIGWMSNWKYANLTPTDGWRGAMTLVRELKLETLEGEVMLTQQPVREMEAHRTELLSLHGIAVDEAAVRLADLQLESSEILVRFDAAFSLGLKVRTGLGQETLVGWDARAAEVYVDRSRSGQADFHKDFPGKHSAPLQTSGSILEMRIFVDRSSVELFADRGQAVITDLIYPDPASTGITVFADDGRKVIESLQVYEFSSFSGQ

SEQ ID NO: 590 - protein, 487 aa, Paenibacillus sp.
MSTFISHNYRGGYHFSPKEHWMNDPNGMVYFQGEYHLFYQHHPFGNTWGPMHWGHAVSRDLVVWEELPIALAPDEFGTIFSGSAVVDWNNTTGFFGGEPGLVAIFTQHAEGPEGEAPVQRQSLAYSTDAGRTWTKYAGNPVLSHDTFVDFRDPKVFWHEASSQWVMIVACGQTVCLYRSPNLIDWTLSSEFGEGIGSHDGVWECPDLFPLQVDGDPGLTKWVMLVSIGDHPELAEGSRTQYFTGDFDGERFTPDAVSQTRVRWIDYGRDNYAGVSWSDVPAEDGRRLFVGWMSNWKYANQTPTGVWRGAMTVPRELKLELRQGSAELIQQPARELEGYRKELLSLKRVTAAQASAQLADLQLESGEIRIRLGSGQSLELKVRAGRGQETVIGYSGAAGEVYIDRTRAGTADFHPLFAGRHAAVLDAADGTVELRILIDRSSVEVFAGGGRAVLTDLIYPDQASTGLSLKADDEEALVESLDIYDLSI

SEQ ID NO: 591 - protein, 492 aa, Paenibacillus elgii
MSTTVKHNYRGTYHFSPNEKWMNDPNGMVYFNGEYHLFFQHHPNGMTWGPMHWGHAVSKDLVVWEELDIALAPDENGMIYSGSAVVDWRNTTGFFGDEPGLVAIFTHHLPQEGDLYLQTQSLAYSKDNGRTWKKFEGNPVLKHESYIDFRDPKVFWHEDTNRWVMVIACGQSVCIYHSPDLKSWTFGSEFGAGIGFHGGVWECPDLFALNLDGDSSKQKWVMLVSIGDDPAYKEGSRIQYFTGNFDGLTFTPDESSHTVRWLDYGRDNYAGVTWSDVPAEDGRRLFIGWMSNWKYANLTPTEGFRGAMTVPRELQLRSGADGCETLVQKPVRELEYVRVRALELTNVSWKEAREALASLRLESYEMKVVASSGLSYAFKVKKGDQGETVVGVDAARGEVYVDRTRSGLHEFHEQFRGVHAAKLQSPGATIDLQIYVDRSSIEVFANGGQAVITDLIYPEGDALGISLMVDDDRLLLASLSVYEMVPSAKSSN

SEQ ID NO: 592 - protein, 496 aa, PaeniBacillus sp.
MSTVMYREKYRPQFHFTPPAKWMNDPNGMVYFDGEYHLFYQHYPEGTTWGPMHWGHAISTDLTHWEHRPIALKPDQNGFIFSGSAVVDWEDTSGFFSGKPGLVAIFTHADHYPDSERPRQRQSLAYSLDKGRTWVMYEGNPVLCNEQITDFRDPKVFWHASKQQWIMVLAVEDRVHFYTSSNLKEWSFASEFGAAEGSHDGVWECPDLIELPIEGHAEETKWILIVSIGDHPQMAEGSRTQYFVGSFDGSTFTNDASPETVLWLDHGRDNYAGVTWSDVDRSDKGKLFIGWMSNWKYANLTPTSSWRSAMTLPRVLSLKKGASGMRLVQKPVTDLQKLRLEAQIWEEVMVSPGQNILSDVHSDTYELECEIDLGDASEVGFKLRNSEREETVVGYNTAMQRLFVDRCNSGESGFHDAFACKHDVQLELQNGRLKLHLFVDNSSIEVFANDGEVVITDQIFPDPSSTGLELYVLDGKAKVISLALHPLKSIYSLVTV

SEQ ID NO: 593 - protein, 496 aa, Paenibacillus sophorae
MSTKSYSETFRPQFHYSPEANWLNDPNGLVWYEGEYHLFYQHHPHSTVWGPMHWGHAVSKDLVYWEELPIALWPDHNGAIFSGSAVVDWHDTTGFFNGGSGLVAVFTHHDTQTPSGVPRQSQSLAYSSDKGRTWTMYEGNPVLEDERHVDYRDPKVFWDSERERWAMVLAAGQRILFYHSPDLIHWSFGSEFGASEGSHDGVWECPDLFRLPVDGGSGESKWVLIVSIGPSDELAEGSRTQYFVGEYDGVSFVSDNPPDTVLWLDHGRDNYAGVTWSDVPAQDGRRLFIGWMNNWKYANLLPTEAWRGAMTLPRELGLAVCEDGVRLRQMPVKELEALREKEFRINHAVINAGDGNLLQDIHGSALEIEAEIKLTGASAFGFRIHGSAGQGTVIGYDASRSYVFIDRRNAGISDFHPDFSCEHGADLKPSGDILKLRIFADHSSVEVFAGDGRVALTDQVFPGPEHQNLELYVQEGSIEIISLHVYGLKSIWDSSK

SEQ ID NO: 594 - protein, 822 aa, Paenibacillus polymyxa
MLDVITIGEVLIDFTPSGRTAGGNEQFECNPGGAPANVAAALSRLGARATLISKVGDDQFGSLLHDTLMNGGIDVSALTFTDEANTTLAFVHLDDNGDRSFSFYRKPGADTYLRTQDVPFDRIENCHALHFGSLSMTHELARTATRAAVVKAKEAGVLLSFDPNIRFALWESKEEAKQNILWGMKYADILKISEDELHFITGTTDVEKGSLELQQQFGIAGIFVTLAEKGCYYRLAGHNGYVPGFQVETIDTTGAGDAFLGCLLYKILKADISLNQLTKQQIIEMLTFANAGGALVTTRKGVLQSMPTTDEITQIIETNKQHDDDRFRPGFHFSPHSHWLNDPNGLVYYEGVYHLFYQHHPYSNQWGPMHWGHAVSQDLVHWEHMPIALFPDEHGAIFSGCCVVDWNNSSGLFDGSHGLIALFTHADSCPETGQPRQRQSLAYSSDKGRTWHKYEGNPILDEHDLVDFRDPKVFWHSPSESWIMALVAGDHVRFYRSDNLREWSLSGEFGKSEGSHDGVWECPDLFELPVDDSGHSKWVLIISIGDNPNCLEGSRTQYFIGEFDGNTFINDHPADHILWLDYGRDNYAGVTWSDIPEQDGRRVIIGWMSNWKYANQTPTGAWRGTMTLPRVLSLTSRDEGVVLTQMPVRELEQLRKGTLCWNEVKVTPEVPFTQKTNDVLLEIEADIDIRSEDEVHIKMKSSGQSETIIGYDPVHQWLFIDRSKSGLTDFHPSFACKHGARVVSENGKIRLHIWLDRNAVEVYANEGLVALTDQIFPDAPMDRIEISAKSGEVVVNSFDMHALNSIHIPNGPTERTSRRVEV

SEQ ID NO: 595 - protein, 517 aa, Paenibacillus pabuli
MPKTEEINKIMESNKQLMDERFRPGYHFSPPSHWMNDPNGLVYYEGEYHLFYQHHPYSNKWGPMHWGHAVSHDLIHWQHEPIALFPDEHGAIFSGCCVVDFNNSSGLFAGTHGLIAIFTHADTCPETGQPRQRQSLAYSSDKGRTWHKYEGNPVLAEPDLVDFRDPKVFWHAPSERWVMTIVAGDHTRFYGSENLREWTLTGEFGQEEGSHDGVWECPDLFELPIDDSGRSKWVLIISIGDNPAFPEGSRTQYFIGEFDGKTFINDNSADHIMWLDHGRDNYAGVTWSNMHDQDGRRVIIGWMSNWKYANETPTGDWRGAMTLPRALSLTSRDEGIVLTQMPVREIEQLRKESISWSDVTVTQEIPFMIKTKDDLLEIEADIDIRTAGEVHIKIQSSGQSETIIGYDPVRQWLFIDRFKSGMTDFHPSFACQHGVKLVPVNEKIKLHIWLDRNAVEVYANQGLVVLTDQIFPDATMNRISIGTNSGQVVLSSLHIHALQSIHIPNGTTEQTLGRDEA

SEQ ID NO: 596 - protein, 545 aa, Unknown
  Description of Unknown: unclassified Massilia sequence
MALTSRLSLLAIGAALLAAGCASQSPDPAPVDLPARGEPFRPQLSFSPQRNWMNDPNGLVYHDGEYHLFYQYNPNRNTWGDMSWGHAVSSDLLHWTELPLALPVEKNASGEITQMFFSGSAVVDHANTSGFGQPGKPAMVAMVTSMYPQARTVNGKPVRAGTQAQSIAYSLDRGRTWTQYAGNPVLPEPPTPYAAEYRDFRDPKMFWYEPEHKWVLATVVAKQHKALFYSSRDLVHWEWTGEFGPAGATGGVWECPDLIELPVDGDPAKRKWVLVISLNPGGPAGGSGMQYFVGDFDGKTFKRDRDAAGDAPRWLDYGADFYAGVTYNDVPGGRRLLVGWMNNWLYGEKVPTAPWRSAQSLPRELGLRTVNGQVKLVQQPIAQAQGLRGPSLYSAAGQTITRGTQAVPLTGTASAPLELKMVLQPGTATRAGIRLGQGTYTEIGYDAKQGAVYVDRTKSGETAFHPQFAARHTAPVALRDGGLPLRILVDRGSVTVFAGDGEAVLTDQVFPPAGAAGVSLFGVDGDAHVRDLDIWSLNSIWKEAR

SEQ ID NO: 597 - protein, 694 aa, Unknown
  Description of Unknown: Aureobasidium pullulans sequence
MVPSLLQAIAFMLGLSQLASAQSYNEPYRPQFHFSPKKGWMNNPNGLLYYNGVYHMYYQYNPGGNTWGNISWGHATSRDLTKWEEQPVALLARGYGKNVTEMFFSGSAVADTQNTSGFGKKGKVPFVAMYTSVHPYAEKLPSGKTVRPNQQSQSIAYSLDEGITWTTYDAVNPVILEPPAAYADQFIDFRDPFVFWHEETKKWVVILSLAQLHKLLIYTSPNLKDWTLASEFGPVNAAGDLWECPSLFPLPLDGKSSNTKWITQIGLNPGGPPGIVGSGTQYVVGSFDGKIFTADADSVYPPPGAPSGSITFADFEGTSFAELGWTATGDLVDAGPVQTVADDLSSSVVDTFLGSDTKEGTLTSKPFTISKSHINFLIAGGNAIGQEGLNLIVSNKTVRQATGANTGVLVWQGWDVSEFQGETAVLEIVDLSTGGWGHTIVDKITFSDGPITSQKANWMDYGPDFYAAVPWNGLATQDRTNIGWMNNWQYAQVIPTDPWRSAMSVPRGLSLQTVNGKAQIVQTAKEKWSSLESRGGSYSNKWSSVSKGTQKLKLDGKTLDIVLTFDDRSAAAGKASRFGIILRASKDLSQQTRVGYDFTIKQLFVDRTKSGNSSFDATFASVYYAPLQATGGGKITMRILLDWSSVEVFGGVGETTLTAQIFPADSETDVLLFSEGGKTKDVSVTAKGVGSAWK

SEQ ID NO: 598 - protein, 485 aa, Sporosarcina sp.
MPTYNLEKYRPTLHFAPQKNWMNDPNGMVYFKGEYHLFFQHNPNDSIWGPMHWGHAVSRDMIEWQELPIALYPDELGTIFSGSAVVDWHNTTGLFPDEPGIVAIFTHHLDKADGTTAIQTQSLAYSHDQGRTWTKYEGNPVLGHPTKVDFRDPKVFWHTKTAKWLMTLATGQTVTFYSSPNLIDWQFESEFGDNIGSHDGVWECPDLFELVVDNSEEKKWVLLVSIGDNPQFDSGSRTQYFVGSFDGSTFTADHQEIQWLDFGKDNYAGVSFSDIPTEDGRRIYLGWMSNWRYANEVPTEGWRSQMTLPRTLALQHVGDQLLVVQNPVKELDSYFTKVVEIDDVLINGEETKTFAVDKSSVEIVLTIDNHDAKQFGVELSHTESQKTLLTIDAETNYVTLDRKNSGEITFSENFSNRQELNLQVTNQMKLRIIVDSSSIEIFLNEGAYAVTSLIYPDKVCEEIALFASGGAIQLTNSYISVSHSL

SEQ ID NO: 599 - protein, 478 aa, Paenibacillus borealis
MERAKYRPILHFTPKQHWLNDPNGLIYFEGEYHLFYQYHPHSSIWGPMHWGHAVSKDLITWEELDIALYPDEHGYAFSGSAVVDWNNTSGLFPEKPGIVAVYTSHLEPTEASPSVQRQSLAYSQDNGRTWIKYAGNPVLTHPSKADFRDPKVFWSEAHGKWVMVLATDQTITFYSSPNLRDWRLESEFGEGAGSHDAVWECPDLFQLPVEGTGDSKWVLLVSIGDNSGQRYGSRTQYFVGEFDGSVFTPEHSDIRWLDYGKDNYAGVSFSGIPAADGRRIFIGWMNNWRYANHIPSQGWRGAMTVPRVLTLHAAEGRTLIRQQPVAELDRYFAETAALPDMLLTPGEHRYLSSKASAMELRLELENNEAEQFGLIIHHTDTEHTELIYSAAEGILALRRDQSGETGFSEIFPDLQSTGRMGSLKNLRILLDACSVEVFANDGLSAITSLVFPGDACTGLTFYSTGGSVQLRGNQSFIR

SEQ ID NO: 600 - protein, 512 aa, Arthrobacter sp.
MTSLNATPALDCRYRPKWHYAAERNWLNDPNGLVYSNGVYHLFYQHNPFADVWGNMSWGHATSTDLLNWDEQPVAIPCDEQEAIFSGSAVVDVRNTSGFGAGGVPPLVAVYTSAYSPASPLAGRQAQSLAYSTDDGATWTKYEGNPVLDRASADFRDPKVFWYDGEAGSYWVMAAVEAVRHEVVLYKSDNLKSWEYLSTFGPANATGGVWECPDLFELPVDGDAGNTRWVLVVNLSPGGIAGGSAGQYFLGTFDGVTFRSETTVTEGMQTDDGRMPDYRWLDWGRDYYAAVSFSNAPDGRRLMIGWMNNWQYAASTPSQGWRSAMSLVREVRLETRGGRPVLVQAAVDPFAASGTELFAAGPAPLADGLLWLPVEASGDVLRIDAEFQPGSAGKVALVLRAGESDGIEERTVLAYSALSGQSLSGELSLDRTASGNVGFHADFPSVERVPVSLDGSGRLRLTIFLDRCSVEVFAQDGRVTLTDQIFPAEGSTAVGLLAEGDGATLVSLSITG

SEQ ID NO: 601 - protein, 516 aa, Arthrobacter sp.
MNSLTTAPGAPPAPTARAAAPARPAADPYRPEFHFTSERNWLNDPNGLVYLNGTYHLFYQHNPFGTEWGNMSWGHATSPDLLHWDEQPVAIPCDEREAIFSGSAVFDEHNTSGLGTAGNPPLVAIYTSAYSDPSPLAGRQAQSLAYSLDEGTTWTKYSGNPVLDRASADFRDPKVFWYDGGEDSYWVMVAVEAVQRQVVLYKSADLKSWEHLSTFGPANATGGVWECPDLFELPVDGNPGETRWVLIVNINPGGIAGGSAGQYFLGAFDGVEFRSESTVTEGLQQDGSRMREYGWLDWGRDYYAAVSFSGVADGRRIMIGWMNNWDYAGSTPTGGWRSAMSLPREVSLAQVDGKVVLRQTAIDPFAGQESPSFSLGLQALASDVQELPVAAAVARIDVEFEPGTANSVGLLVRAGEAERTVISYDVTEGILRLDRRESGRADFHAAFPSVEAVAVPLQDGRLRLSVHLDRCSVEVFAQDGLATITDLVFPTEASTALAVFAEGGGAHLVALDVVGR

SEQ ID NO: 602 - protein, 545 aa, Burkholderia cepacia
MISTSFRFSARIARLLLACLACTQVAAAPCHAPADDGTPQWRPALHYTPQRNWMNDPNGLVYDNGRYHLFYQYNPLGNDWGNMSWGHATSTDLVHWREQPVAMRANATEEIFSGSIVADTRNTSGLGTPGRTPLVALYTSVYKAGSGHAPGTQAQSLAYSLDHGTTWQPYARNPVLTLAPESKQFRDPKVSWYAPGGYWLMTTVVADAHVVKLYRSDDLIHWNFLSDFTLPGVPHDGALWEMPDLVPLPLDGDPARTRWVMIVNVNPWSIAGGSGAMYFVGHFDGRTFTPDRVAPAGSDPAQFRWVDHGADFYAAGTFSGAPGSRPVAIAWMNNWDYAAKVPTAPWRGAMSLPRELSLKTIDGEPTLVVAPAAAFDAWADGRPAVHEGDLAVDSATRVLSPATRGAVQRITVTIAPRHAARTGLIVRRSADGSVGTRIVYDTAKRTLTLDRSRSGAADFAGTFSREHIVDLPLEHGLLRLEIVVDRGSVEVFANGGRVALTDLIFPPPDAERVAVFAEHGRATFSALTVTQLEAGDDGHGACAAR

SEQ ID NO: 603 - protein, 548 aa, Burkholderia ubonensis
MRFTLPRFPFHAALLLACTAGAHAAAPYVAPCAAPVADGTPQWRPALHYTPRRNWMNDPNGLVYENGRYHLFYQFNPAGNDWGNMSWGHATSTDLVHWREQPVAMRANATEEFFSGSIVADTRNTSGLGAPGQTPLVALYTSVYKAGSGHAPGTQAQSLAYSLDHGATWRPYAHNPVLTLDPESKQFRDPKVSWYAPGGYWLMTTVVADAHVVKLYRSDDLIHWAFLSDFTLPGVPHDGALWEMPDLIALPLDGDPARIRWVMIVNVNPWSIAGGSGSMYFVGDFDGRTFTPDRVAPAGSDPAQFRWVDHGADFYAAGTFSGAPGAQPLGIAWMSNWDYAAKAPTTPWRGAMTLPRAFALKTIDGEPRLVVTPAPAFDAWADGRPATHLGNVSVASATRELPAATRGTVQRITLTLTPRSAARAGLVVRRSADGAIGTRIVYDTAKQTLTLDRSQSGEANFSNAFSRQHIVNLPLQNGRLPLEIVVDRGSVEVFAGHGRTAITDLIFPPGDADRVAVFAEHGGATFDGLTVTHLAGPDEAGRACDAPR

SEQ ID NO: 604 - protein, 666 aa, Unknown
  Description of Unknown: Fusarium oxysporum sequence
MATLDSPILVQLSSKRHVYETVVYGASYNTPSTTSHDDVLHGQDPFATAKASDCTATSTPGSQSENAHDRWRPRYHLMPPTGWLNDPCAPGYDPAHDAYHVGFQWNPKKPEWGDISWGSALSKDLVSWEVSGCPSIQPSKKHDGEAGVFTGCWSPVPSAPDRSTAFYTSARALPIHHTIPYNWGSEAICIATSNDAGRTWQRGHAPTILKGPPRHLQVTGWRDPYVAKWPSLSRVLGDRSDQALFGIVSGGIRGIGPVIFLYSLEQYDLAAWNFLSVLTIATTSQREHPSQWEPDYGANWEVVNFLSLPDPDDQAISHDVLMIGVEGRKQFTVKTSGRHRHSEFRRDHGQMWVSGRLTKTSAGMQMQFRSGGALDYGAIYAVNSFHDPRSNQQVAFGWIVEEDLSAELKGTQGWAGLLSVPRVVRLSRICHVVHALKSDLTSIKSCDVVPEDKPQQKLLFPTKSPQTYTITTLCALPDPRLNKLRQSERLLGPITDHTLPEALGSLEFPLGCSCWELDVSFDIGNDVQSIGFVISHTKDSELRTVVSFSPDSETLKITRAKSTNMTDICVADEEAPHTLFSTLSPGTAAEAEPFPSQEPLRLNVFFDVSCLELFANKRTAITTRVYPESMACYNIQPFVVKKSERPWSGQLLECTAWELKTSCYEV

SEQ ID NO: 605 - protein, 551 aa, Unknown
  Description of Unknown: Yarrowia lipolytica sequence
MKLATAFTILTAVLAAPLAAPAEAFLFLLAGFAAKISASMTNETSDRPLVHFTPNKGWMNDPNGLWYDEKDAKWHLYFQYNPNDTVWGTPLFWGHATSDDLTNWEDQPIAIAPKRNDSGAFSGSMVVDYNNTSGFFNDTIDPRQRCVAIWTYNTPESEEQYISYSLDGGYTFTEYQKNPVLAANSTQFRDPKVFWYEPSQKWIMTAAKSQDYKIEIYSSDDLKSWKLESAFANEGFLGYQYECPGLIEVPTEQDPSKSYWVMFISINPGAPAGGSFNQYFVGSFNGTHFEAFDNQSRVVDFGKDYYALQTFFNTDPTYGSALGIAWASNWEYSAFVPTNPWRSSMSLVRKFSLNTEYQANPETELINLKAEPILNISNAGPWSRFATNTTLTKANSYNVDLSNSTGTLEFELVYAVNTTQTISKSVFADLSLWFKGLEDPEEYLRMGFEVSASSFFLDRGNSKVKFVKENPYFTNRMSVNNQPFKSENDLSYYKVYGLLDQNILELYFNDGDVVSTNTYFMTTGNALGSVNMTTGVDNLFYIDKFQVREVK

SEQ ID NO: 606 - protein, 509 aa, Unknown
  Description of Unknown: Schwanniomyces occidentalis sequence
LSVDTSEYNRPLIHFTPEKGWMNDPNGLFYDKTAKLWHLYFQYNPNATAWGQPLYWGHATSNDLVHWDEHEIAIGPEHDNEGIFSGSIVVDHNNTSGFFNSSIDPNQRIVAIYTNNIPDNQTQDIAFSLDGGYTFTKYENNPVIDVSSNQFRDPKVFWHEDSNQWIMVVSKSQEYKIQIFGSANLKNWVLNSNFSSGYYGNQYECPGLIEVPIENSDKSKWVMFLAINPGSPLGGSINQYFVGDFDGFQFVPDDSQTRFVDIGKDFYAFQTFSEVEHGVLGLAWASNWQYADQVPTNPWRSSTSLARNYTLRYVHTNAETKQLTLIQNPVLPDSINVVDKLKKKNVKLTNKKPIKTNFKGSTGLFDFNITFKVLNLNVSPGKTHFDILINSQELNSSVDSIKIGFDSSQSSFYIDRHIPNVEFPRKQFFTDKLAAYLEPLDYDQDLRVFSLYGIVDKNIIELYFNDGTVAMTNTFFMGEGKYPHDIQIVTDTEEPLFELESVIIRELNK

SEQ ID NO: 607 - protein, 602 aa, Ustilago maydis
MKSILVGAALATFATFVSAAPSTIDPFDFREADLVYPRMNYDSAQHDARALGKGQCLNSNGSSLAGYQPALYTEPVRPQIHFSPTVNFMNDPNGLVYSNGKWHLFYQYNPTENVAGNQHWGHAVSTDLYHWENLPIAIAPEKEGEGIFSGNAVIDFENTSGFFNESTPKDQRIVAFYTLNTPTSQTQHLAYSSDGVHFTKYPEAVISRNQTQFRDPKAFWDEKSSRWIVALALSQEFGIVFYSSPNLKDWTEVSRFQSSGILGYQYECPDLFQVPIEGGPDDGKMMYVLAISINPGALVGGSFVQYWVGDWDGSKFTPRDNAVRTMDFSKDFYAFSSWNNSPGKKAYAIAWANNWQYTNQVPTSPFRSIQSLPRELTLKYYRPTPQFGDLILNNKPANLSALRSKTLYKSDNGNSATNKTVHLKGKGAFDITATFKLPASSKITYNTIASFEIFAGDGKQSVKTGIQMGEPAVAYIDRRGAGPSFAAENPFFTDKTSGIVRYAANYTSASDGGSDQYVLGPLPTSAYLDTAGKDQYIKLQAVVDRSVIEVFVNDGELAGTSVFYFDNDEIPAKVTVSIGDNQIKLVDLEVTALDSIWSKCNK

SEQ ID NO: 608 - protein, 519 aa, Cryptococcus sp.
MFRSLVPITIAGLAYLLQSPAQSTTTSAASVPTGVPIEGDYSGPYRPRIHFSPPKGFMNDPNGLHRDSNGTWHLYYQYNPTDIVAGNQHWGHATSPDLYHWTNQPIALFPPNSSSGVFSGSAVIDTNNTSGFFPDQDNGVVAIYTLNTPTAQVQQIAYSKDGGYSFEEYEGNPVLDVGLTQFRDPKVIWYEDHWVMAVAFPVDFVIGIYASPDLKSWTHASNVTHVGFLGLQYECPNLVSVPIANSSDSAWVLTISINPGSPLGGSITQYFPGEFNGTHFTPFDSAARLTNFGKDDYAGQFFYDEPVSIGWASNWQYTNFVPTGEEGWRSAMTVPRRNYLANMSTAGWDLVQEVYDLSPVVGDQLDTQQLVNKSSTATFTEGAYIDINFTIPDGASFAEYASLNLTISTNSTGETVKGGYFFADPYSIALWLDRGGTKAFESPFFTDKFSVAPAHLAKRLQVIIDRSVVEIYIDNGALVGTMVVFPEEPCTKLEVTTAGMPDESEVEFGVWDLKDAWTS

SEQ ID NO: 609 - protein, 1423 aa, Streptococcus mutans
MEEETVCKNWFMRKSGKSWIFGCAVFFVLGLATALPVAAEEISQTTAADTAVTEVRREDSSQTSSQETAVTETTQSEETASKQLTTPAVADQTTEPTDNEPISSSDGASSPYQVTDTTEPQQTLTPADSEPQAKADVQQAAAPKKEEINPVTNLEDMSHDTNGTWEVREDGIHSNAIGKGDSFLYSQSSGKNFVYATDVTFKQNSGAAALVFRSNNDSNNKNMYAVNVDIGGHKAKFWRWVDNKDIQLIDERDVVPTADNRYTLKVVAVNNWISYYVNDVLMASTGDYVLQKADKGQNTVIPEGHFGLLNWNGDMVFQNTKFALLDDAIAPLIDNITVRSDRGNVEKQGQFFSEEPLHIQYVSNDASQVSLDIAKHNPAATVTVEDKTGRVYTDPSHLPVNVGANYFTVKSTVIDSFGRTVTLTYRINVHRRQNDEVYYNELYRDQYHYSVKDGWANDPNGLVYYNGVYHLFHQFYDDTKWGPMHWAHATSTDLIHWKEEPIAFYPDSNGYMFSGCVVVDEHNSSGLFKTAKGGLVAIITANGNGQRMELAYSEDEGKTWQKYDRIVADWSNDPLQNQDFRDPKVFHWNNQWFMVLAGGPLRIYSSNNLKDWKVESTYPDLHTECPDMYPIVANDGVLKWVLSRGGRFYKVGDFKQVDGKWTFIADDAYKDKDQVMNFGKDSYAAMTYYVHDFGTETRPTIPKLTEVNWMNTWEDYCNLVADTVGQDFNGTFNLNLDLGLINENGQYILTQTPVKAYDSLRDVNTALHFKDVTVDANNTLLKDFKGDSYEIVSHFRPDEKTTKVGFNLRVGNGQATKVIYDLQTETLSIDRSQSGTILSAAFAKVNSQHVTKNADGSIDLHIYVDRASVEVFSKNNTVAGANQIFPNPEAVGASIIVEGGKAQADISVYQMKTVWTDKKDTTKPVAMNTTTAKELALQVGQTQDLQVYLAPASVRQDVEWTISDPSLVRTSQKGNVLHLTAVKKGKLTITAISKENPSLSKTFTISITLNNFKTNLKGLQSVTGKWYVDDETLYDSNTSSNDYYMASQKPGFKEYDYDIDLKYQRGLINLFVASGNIDPSQAYSVQFGDSETVRLYRFAGDTIAEANMGKRINDDQYHHIKVTKTKNSIIISVDGQEVMSHNFDQVDSYFNDAYVGLGLWDGAVEFQNFFVTDHATTPKPDSDPTPQPDAPEALAQERELIDPATGVRVILQKGELASIVRVKVSHIETNDAHTPAVLNAKDYDLFNITPIDKNEKVVSITKPATVLLPIDAGKVVDKVVYLPNTDKEESLPFTIVSLTDSNGKKQSYVRFTAEHFSEYGLVYQAENQTNLKSKEKQDNVAISYPLNLEQEVKVSSISRKYAANKTADVNSVQQTEPSVMSSSSKATLPDTGDHKTDLSQLGVLAMIGSFLVEIAVYFKKRKD

SEQ ID NO: 610 - protein, 1405 aa, Streptococcus gordonii
MKNHQEKVCKNWFMRKSGKRWFFGCALLAFGAFLLDGGGVVYADEGKANPAPAQVLQADSSAVSEPESGQTAAPTSNADKTENSVAGETAATEASGQDTAVESANQKADKENQATANAKETKQEEDEQPAAKEVASEKIPAVETVDKQSGFNTNLAEAKGDKNGVWEVREQGLYSDARGKGDSFLYSQSQGKDFVYSTDVTFLSKEGAAALIFRSNNDPDDKSSYAVNIDGGSNNVKFWRWQGGRDYQFINEKHIEPTDDNKYRLKVVSIGSWVSYYVNDILVASSGDYTLQRDDKGQNTYLSEGYFGLLNWNSELLFQNTFYKEITPQSNPELEDIRVTSSVGKVEQKGQFTAPITIQYVKHDAETVDLTVVAKNPATKVSVTDAAGRVYSDLKNIPLAVGANYLTVTSTVTDADGQEVSLTYRLNVHRRQADEVYYNELYRGQYHYSVKDGWANDPNGLVYYKGAYHFFYQFYDDTKWGPMHWGHATSKDLIHWEEQPIAFYPDANGAMFSGSIVADTTNSSGLFDNDQGGLVALITADGNGQRIKLAYSKDEGRTWTKLDQIAADWTDDPLQSQDFRDPKVFRWEGKWFMVVAGGPLRIYSSDNLRDWKVESTYADLHTECPDLYPLLADDGSLKWVLSRGGRSYKVGDFRQMEGKWTFVPDAEFAQADQVMNFGKDSYAAMTYYVQDFGSKANPTLPDIIESNWMNTWEDYCNLVADTVGQKFNGTFNLNLKLGLIKQDGSYRLTQTPIAAYQSLRQGDKAVLYKDVEVSEKNELLKDFSGDQYEIVSTFRPSETTKKVGFNLRVGDGEVTRVTYDLEKETLSIDRSQSGILLSNKFAQVDSQSVKRNADGSIDLHLYVDRSSLEVFAKGYTVAGANQIFPAPNSLAASVFVEGGAAKADIALYPLKGIWKDKQAVTKPLELVQASPVTNNIYVGDSLDLKAYVMPASVSQAVSWSVDQPELVSVTEDGNKLRVTALQRGVVKVTATSKENPSLSKVFTINISRNDFKTNVPDLKAVSGKWYVDGESLYNQNTSANDYYMGGQKIPFPEYNLDVDLKYQKGLINIFYASENVDPRNAYSIQFGDNDKIRLYRFMGETIAENSMNGKHLNDGQFHHVKLVKTKNGVSVSVDGVEYLNHQFDTVEPYYNDAYVGLGLWDGDLEARNFFVTNLHAPAVNKASLQKVVDSTASLDPSLYTDETVQAYQAALARAQSLLADEKAEQEDLDRAEQDLKTALVALAVKPSHQVTPEEGIKDLVEEKPFLEIVMEEIAYQTREQENPELERGQRRILVAGQKGQKRVFVEVLNGQRTILGQEVLSLAVDELVEVGSKVVAESAKQPLTRTQPQALKQGEEEKVIPSPRLQPAPDSALPKTGTQEDKFLPLAGLAFLGMGLLAGRKKQED

SEQ ID NO: 611 - protein, 1302 aa, Streptococcus salivarius
MNDSVCKNWFMRKSGKTWVYGCALVSFACLALAGPVYADQVEQATVSPIPQEVVAQTDHQVAPQVEVVPSSTKEAPQVVEPSPSLVSEPAKASVENGTNTSPDQLKEVQTQASEAEKVTSQTQEADLNQTNQERPVITNSTSPVHVTEDKTDLPNNEAVTNLEGMTADQNGHWEMKDDGIHSEAKDKGDSFLYSQSEGKNFIYSTDVTFKEAGGAAALIFRGNNDSSDKNMYGVNVDSGNHKVKFWRWVNNQDIQLVDEKDVTPTADETYNLRVVAANQWLSYYVNDVLVASTGDSVLQKSDKGQPQVLPEGYFGLLNWNANVIFKNTRYVNLDDASLPLIDNLAVTSKTGSVEKQAQFFSEEPLHIQYVGHNAETVGFDITKHNPNAVIKVEDAKGNVYTDISQLPVAVGANYFIVESSVTDSLGRPVTLTYRVNIHRRQSDDVYYNELYRDQYHYSVKDGWANDPNGLVFYKGRYHLFYQFYDDTKWGPMHWAHATSRDLLHWDEEPIAFYPDATGHMFSGSVVVDSTNSSGLFKSSEGGLVAIITSNGNGQRIEIAYSEDEGRTWQKYDKVVADWSQDPLQNQDFRDPKVFRWNNQWFMVLAGGPLRIYSSQDLKNWQVETTYKDLHTECPDLYPIVANDGALKWVLSRGGRSYKVGDFKQVDGKWAFVADDVYQDHDEIMNFGKDSYAAMTYYVHDFGTADHPNIPQLTEINWMNTWEDYCNLVADTVGQKFNGTFNLNLDLGLVKSGDRYLLTQTPVKAYESLRDTENAQYFENVTVASDNELLKDFKGDTYEVVSHFVPGKDTTAVGFNLRVGDGQATKVVYDLTKETLSIDRSQSGTILSDAFAKVNSQQVTRNEDGSIDLHLYVDRASVEVFAKGNTVAGANQIFPSPRAVGASVLVEGGPAKANIAIYPIKSTWTDKKEVTKAVAMNTTVAGHLALEVGQSKDLQVYLAPASEEQDVTWTVSDPSLVSYTEHDNKLSLKALHKGHLTVTATSVENPSLTKTFNIDITLNNFATNLKGLKAVTGNWYIDDDTLYDSNVSANDFFMAYESNGFKQFDYDIDVKYQHGLVNLFVAAEREEPGRAYSVQFADNDTVRLFRFGGETIAEAHLDKAINDGQYHHVKVEKGKDTMTVYVDGKEVLHHQFDAVDNYFNQAHVGVGLWDGSVEFQNFFVTEKLTNTSSDTTDEPIKPDPQPEPSPEPNSENKTDEPEHQPEIAPEPEPTGQNNSHDSTNTVPASSQDNTGKQEESKAPVETPKTIAPIVDNLLKTFNKFSLSTFLASIAKETWHFLTKWLFS

SEQ ID NO: 612 - protein, 1343 aa, Streptococcus sobrinus
MTDSSSTESKRTGWYMHKRGKHWIFGCSLVTLLVAGLALASPVYAEDTTATTSSSSSTQLADVGGLAEKSMNNSATTADNQTASVGQETSAVDEMDKSDTPSKSDEVSEQATADTSTATTSVESSEQTGVASNNEKDPTIKPVDGAVTVEKTDLADVAQVAEKGYQTNLTNLKPTNGTWKVRDDGLYSNALDKGDSWNISDIKTDNFVYSTDVKFLKNQGAVGLIFRSTDPNNVQNSYAINIDGGTKKSKFWRWQDGQDQQLIDERQIEPSADGNYFIRVIAIDSWLSFYINGQLIGSTGDYTLQKDDKGQTTVIKEGYLGLLNWNSEVVFQNTYYTPITDDLNPELEDVAVTPDQGGAEKKGQFLANAPINIQYVDNATTSVKLAIKSKNSQAQFKISDSTGKEYQLTDSIPLAVGANYLTVTSTVTTEANQASLTYRINVHRRQANEVYYNELFRDQYHYSVKDGWGNDPNGLVYYKGKYHLFYQFYDDNVWGPMHWAHATSTDLLHWEEQPIALYPDSNGTMFSGCIVVDEHNSSGFFKDGEGGLVALVTADGNGQRIKLAYSSDEGQTWTKVDQVAADWSNDPLQSKDFRDPKVFHWNNKWFMVLAGGPLRIYSSDNLRDWSVESTYPNIQTECPDLYPIQTDDGTVKWVLSRGGRYYKVGDFKQVDGKWTFCPDQAYQDSDGIMNFGKDSYAAMTYYVQDFGSEANPTIPKLTELNWMNTWDYCNLVGKTLDQDFNGTYNLNLQLGLTKENDRYVLTQTPIKAYESLRDTAKAINYQDVTVSANNDLLKDVKSDSYEIVSTFRPSASTTKVGFKLRQSQDQATVVSYDLQTQELSIDRNKSGIIINDKFAEINKQKVTTNADGSISLHIFVDRASLEVFAKGDTVAGANQIFPAPDSLGASVFTEGGDAKADIAFYPLKSIWTNKVVTDKPFKLVGTGQAETRLNTGQSTSFEAYLAPAQAKQEVNWQLDKPDLVDFSQSGNKVTLTAKKAGSLTLTASSKEDPSLTKVYKINIFENNFKTNLKNLKAISGQWVVDDKELLDSNTSANDAIMSTDIVSYAEYKLEADVKYQKGLVNIFFASPATDPANAYTFQLGDQASARLYYFQGDTITEEPLTKALNDNLYHHLEIKKTKDSVSLSIDGQEVMSHKFDTVKDYFNKAYIGLGLWDGEVAFQNVYLTPLNQEVKSQGWFTANQAWYYRKADGQLETGLADIDGQTHYFNADGSQVKGDFASPDGGKTWYYLDKDNGQVLTGLQVINGKTYYFNADGSQVKGDFASPDGGKTWYYLDKDNGQVLTGLQVVNGKTYYFNADGSQVKGDFASPDGGKTWYYLDKDNGQA

SEQ ID NO: 613 - protein, 1301 aa, Streptococcus gallolyticus
MKKEQEKKCVNWFMHKRGKQWIYGCGVLVCGMVLGTVATPVMADEAVSSPTELVTVADVNADNNTNTDQKTEVDQETQQPANQVETPENQTPIEQGMVGEQNQKVTEENQVTENQDVTQQNQVTENQEPATETQDDAQKTETTDAEEKVEVTDSLKQKADQPNESTEKARKALSTNLTTKKESSYNTNLQGLSYDANVWEVREDGLYSNAIGKGDSFLLSTSAGKNFVFQTDVTFLQNTGAASLVFRSTGDAQNLKGYVVNLDGNSHKIKFMRWGEANLIDEKEIEATSDNKYSLKVVAANGWISYYINGILVANLSDYTIQRDDRGQTTYIKDGNFGLLNWNSEMIFQNTFYRELTDAELPILKDVTVSSKNGPVEPKGQFFPEGAVYIQYVSHDASTVDLSFVPNNQDAVIKVTDDQGNVYSDPSNIPVSVGANYLTVTSTYTVDGYEVTSTYRINVHRRQSAEVYYNENFRDQYHYSVKDGWANDPNGLVYYNGVYHMFYQFYDDIQWGPMHWAHATSTDLIHWEDQPIAFYPDYNGAMFSGCIVADPNNTSGLFEGDKGGLIALITADGEGQRIKVAYSKDEGKTWQKLDEVAADWSTDPLQNRDFRDPKVFRWEGKWFMVLAGGPLRIYSSDNLLDWSVESTYPDLHTECPDLYPIMAEGNTVKWVLSRGGRYYKVGDLKQVDGHWKFVADADYQESDGIMNFGKDSYAAMTYYVQDFGTKDNPTIPQIIELNWMNTWDNYCNLVAERTGQKFNGTFNLNLTLGLVKDGDKYVLTQTPIKAYESLRDVDHKVEYKDVVVGKDNNLFKDFSGDTYEIVAHFKPSDRTTKVGFNLRVGQGEVTKVYYDLQTGRIAIDRSQSGIILTELFRNVDSQAVTRNADGSIDLHIFVDRASVEVFTKGDTVTGANQIFTSPQSLGLGVFAEGYEAKADIALYPLKSIWKDKVETTKPQSIVPASAKNVRMNVGDSTVVKAYVSPAVVNQDLLWSILNNGNVSTEISGNQVFVKALKKGQVIVRAQSKTDPSVYQDFVLDILEDNFKTNVKNVKVFAGDWHADGESLKVENHNSNDIYMAADKMPYENYQMDLDIKYGRGVVNIFFASGNPDANNAYSIQFGGDNSVRLFRFYSDTISESQMTAAINDNQFHHVHLVKSANVIQVFVDNQLAMSYTFDQVEDFFNNSYIGLGLWDGELEVQNFFVVDLDAKEPTQNEEKVEVVPTDPQTPAEQVVTTTTLAAKAPAKSEKATDAKAPVIPKTALVSETVLPQTGEKDSHLAGLGIVSILAAMGAFFGQFFKKKES

SEQ ID NO: 614 - protein, 1484 aa, Enterococcus sp.
MKKSYHYLFISGLVLGGVMLNTHVVQAEEFAAATTSEVVTDTSIPSNQQVTEAETVSVPPTTAIATESAYEEEPVSTASTSTVMTTSSLVSDTTNRTIAANEAEKVSVPPTTAIATESAYEEEPVSTASTSTVMTTSSLVSDTTNRTIAANEAEKVSVPPTTAIATESAYEEESVSTASTSTVMTTSSLVSDTTNRTIAANEAEKVSVPPTTAIATESAYEEEPVSTASTSTVMTTSSLVSDTTNRTIAANATTTSSTSSDSANFETNLEFSDVTEKEGWQEVNDGLYSNAIDKGDHFLYSQTTGEDFVYSADITFLKDQGAGALIFRGDQNTDVKNAYAVNLDASNHKAKMWRWDDNQDYQLIDEKDIVPTEDKKYHLKVVALDTWLSYYINDQLIASTGDYILQRDDKGQDTFIQEGYLGLLNWNGEMIFQNVRYTPLTDDSSPLIEDIVVTSDGTVEAKGQFFEEEPAHIQYVKHDADHISIKVSPKSTAAQITIKDANGTIYSDFSDIPLNIGANYLTVNSQVVQPDGTVAEVSYRLNVHRRQSDDIYYNELFRDQFHYSVEDGWGNDPNGLVYYNGTYHFFYQFYDDNKWGPMHWGHATSKDLITWEEQPIAFYPDANGTMFSGAMVIDEKNTSGLFPDGQGGLVALITANGNGQRIKLAYSTDEGKTWTKSDKIAADWSDDPLESKDFRDPKVFLWENQWFMVIAGGPLRIYSSDNLLDWKVESTYADLYTECPDLYPIETESGELKWVLSRGGRSYKVGDFKQVDNKWTYIPDADYLEEDGVMNFGKDSYAAMTYYLQDFGTATNPTIPQLTEINWMNTWDYCNLVGDALGQAFNGTYNLNLNLGLKKDGSKYVLTQTPIQAYEGLRLLDESIVKQNVLVAQDNQLFADFKGDVYEIVSTFRPSADTKKVGFNLRVGDGEQTKVYYDLETEKLVLDRSQSGVILNNAFAEINSQTVKRHDDGSIELHIFVDRASVEVFAQGNTVAGANQIFPAPTSNGLSVLIEGAAAEAEIALYPLSSIWSEKQVVTDPIDIISLSKATNRLNIGDELELKAYIMPGDVAQDVIWTVDDASLVQLQAQGNRVVLRGLKSGPATVIVTSQSDPTLSKTFTVNILEDQFKTNLDDLVAVSGDWYRDGESLIVSNTGANDYYMTSQPVAESDYSLDLDVKYERGLVNIFFASENKDPRMAYSLQFGGNDQIRLYRFMGDTIAEAPMASPINDNKLHHVKLVKSGENLSVLVDEVEYISYTFDQLEPFYQEAPYVGVGLWDGEMAIQNLLITYAKDAESNDNSPIVDTSTEAPQLPTANAPQLPAVPTATTSQGTVSPVSENNSITHGTEILAHSNSLDFENNSNNMAQYGIQTYIYQHGSLEYNQTEMKLNQSSENTLPQTGDSKAKLQDSVGEMKLNQSSENTLPQTGDSKAKLQDSVGEMKLNQSSENTLPQTGDSKAKLQGIVGLVLLFFASLLGLQISQKKSKKW

SEQ ID NO: 615 - protein, 1269 aa, Streptococcus uberis
MKQEKKCVNWFMRKRGKQWIYGCGILICGLVFGVEATSVAAETIPTTATVETLNSDVTSKTSQETQKTTEIATPVSEIVMPSQQKVVEEVTQEASVQNQETVINMPVLTQGVNIAGPNETAILTDSIVQNNVQPIDRVEKMETSFSTELTKKAESSYNTNLQDLNYDPNVWEVREDGLYSNAVGKGDNFLFSASTGENFIFQTDVIFLQNTGAASLVFRSNNDPENLNGYVVNLDGNSHKARLWRWAEANLINDKEILASPDNKYFLKVVATNGWISYYINGILIANLSDYTIQRDDLGQTTYIKDGHFGLLNWNGEMVFQNTFYRELTNEELPLLNDVTVTSKNGPVEPKGQFFSESSVYIQYVSNDASTVDLSFDANNSDAIITVTDAHGKVYSNPSAIPVTVGPNYLTVTSIYTTTDGYVIPSTYRINVHRRQPQSVYYNENFRDQYHYSVKDGWANDPNGLVYYNGVYHMFYQFYDDTKWGPMHWAHATSTDLIHWEDQPIAFYPDYNGTMFSGCIVADVNNSSGLFDSENGGLVALITINGEGQRIKLAYSTDEGKTWQKVDEIVADWTTDPLQTRDFRDPKVFRWENKWFMVIAGGPLRLYSSDDLKNWTVESTYPDLHTECPDLYPVLAEDQTVKWVLSRGGRYYKVGDLQQADGNWKFIPDANYQETDSIMNFGKDSYAAMTYYVQDFGTKANPTIPKIIELNWMNTWDNYCNLVADRLGQSFNGTFNLNLELGLVKEGDKYVLTQTPVEAYESLRDNDNKVEYKNVVVGKENDLFKDFSGDTYEIVAHFKPSDKTTKVGFNLRVGSGEMTKVYYDLIAGRIIIDRSQSGIILTELFSNIDSQAVTRNIDGSIDLHIFVDRASVEVFLKNHTVAGANQIFTSAQSLGLEVLIDGEDAKADIVLYPLKSIWKNKIIDTTPQIVIPASEPKVRMNVGDSTTVKAYVSPVGASQDLIWNISNPSLVLDQISGNQVFLKAIKKGQVIVRAQSQSNPAVYQDFIIDILEDNFNTNVKDVNVFSGDWYVDGESLKVANHNSNDIYMSADKIPYENYQMDLDIKYGRGIVNIFFASGNPDANNAYTIQFGSNNSVRLFRFYRDTIFEAPMIDVINDNQFHHVRLVKSANVIHVYVDDETVMSYTFDQVEEFFNNPYLGLGLWDGELAVQNFYVIDLDAQNPVFVEEHEKEKLLSELNKSVVKTSSYSTLKTIETSSKTNSENLEAPIVSKKNLPMTSDSNNNLEELGILAILTTLGAFLGRVILKKEK

SEQ ID NO: 616 - protein, 511 aa, Unknown
  Description of Unknown: Gemmatimonadetes bacterium sequence
MRRVLLAASCVLMLAPSLTGAQGRTTAQRAAPLEPFRPRFHFTPERNWMNDPNGMVYYDGEWHLFYQYNPFGDKWGHMSWGHAVSRDLVHWEQLPLALAESDGVMIFSGSAVVDWRNTSGFARDGKPPLVALYTGHRDGHQDQRIAYSNDRGRTWSKGGVVLDLNKADFRDPKVFWHAPSSRWVMTVALSPEYKVQFYTSPDLKRWTRSGEFGPAGSRGGIWECPDLFPVQVEGGGTRWVLIVNLNPGAPAGGSGTQYFVGDFDGQRFVPDGEVAQPLWADYGADFYAGVSWSDVPAADGRRVWLGWMSNWSYAQEVPTSPWRSAMSVARTLTLRRTPAGLRLVQRPVAELERLRRGVPRTFAGGTFTQASAWLAAQRDLPMLLDVEMTFAGASSAAPFALQLTTGPAESLALSIDPANRRIALDRTRSGRVAFHKDFPGVHTAPIRIANGEIQLRLLIDAASLELFAQQGETVMTEIFFPTGDSRALSLSATGTTPRVQQIRIHGLDSAR

SEQ ID NO: 617 - protein, 548 aa, Burkholderia sp.
MTSTFPCFFLRLAGLLLACSAGVQAASAACTATPADGTPQWRPAFHYTPQRNWMNDPNGLVYENGRYHLFYQYNPLGADWGNMSWGHATSTDLVHWHEQPVAMHANATEEIFSGSIVADPHNTSGLGTPGDTPLIAVYTSVYKEGSGHPPGTQAQSIAYSLDHGASWQPYAHNPVLTLDPESKAFRDPKVSWYAPGRYWLMTTVVADAQVVKLYRSDDLIHWSFLSDFTLPGVPHTGALWEMPDLVPLPVDDDPRHIKWVMIVNVNPWSIAGGSGAMYFVGEFDGRTFVPDRVAPAGSDPAQFRWVDHGADFYAAGTFSGAPGRRPLAIAWMSNWDYAAKSPTAPWRGAMTLPRELALKAIDGEPTLVVTPAAAFTAWADRRPAVHVGTLEVDSAARALPPATRGVAQRIDVTIAPGQAARAGVVVRASADGAIGTRIVYDTAARTLTLDRSRSGTPDFAATFSRQHIVALPLENGLLRLDIIVDRGSVEVFANGGRTVLTDVVFPPADADRVSVFAERGTATFSGLTVTPLGARDRAGEGDCVASAR

SEQ ID NO: 618 - protein, 511 aa, Unknown
  Description of Unknown: Fusarium odoratissimum sequence
MPYPTKFVGLALISLLTCLTQADDFRPLYHFVPEQNWMNEPNGLIKIGSKWHLFFQHNPTGNFWGNLSWGHATSTDLIDWNHLPVAISSANGVQSFTGTSYFDEANTSGLGTSENPPYLAFYTGYFPDTGVQDQRLAYSLDQGETWIKYSENPIISQAQEKPHDITGGLETRDPKVFFDAATKTWVMVLAHGGQNKLSFWTSPDAKTWTWHNDLTDDGIPGLPSGITGWEVPDLFNLPVEGSSDTKWVLIVTPAQGSPAGGNGVFAVTGSFDGATFTSDPVDPTNMWLDFGRDWDGAYSWENVPTSDGRKILASVMNSYGVDPPTNAWKGMLSFPRTLQLREIGGELRFIQQPVIELESVGTSLSNIANQTLEPGTTLLSDYHGTALDISISFVPTEGSILSLAVRKGDSEQTVIQYAQSNGALTVDRRASGNISYNSAAGGIHTATFSPDSNNVAHLRVLVDMCSVEVFGGAGEVVISDLIFPSESSNRLSLSTTGGNVVLQSVEIRSVA

SEQ ID NO: 619 - protein, 522 aa, Unknown
  Description of Unknown: Fusarium denticulatum sequence
MAYKHGLGAFSPAPGAKLFKLAFVFVLACFVQADDFRPIYHFVPDKNWMNEPNGLIKIGSKWHLFFQHNPNGNLWGNLSWGHATSTSLVDWTHLPVAISSANGIQAFTGTSFLDEANTSGLGTSSNPPYLAFYTGYFPSSGVQDQRLAYSLDQGDTWTKYSGNPIISQEQEKPHDTTGGLEIRDPKVFFHKDSEAWIMILSHGGQNKLSFWTSPDAKAWTWKKDLKAGDIPGLPSDVKGWEVPDFFELTVKGTSDTKWVLLVTPAEGSPAGGNGVFAVTGSFDGTTFSADAVDSTNMWLDFGRDWDGAYSWENVPSSDGRKILASVMNSYGGDPPTNTWKGMLSFPRTLELQNINNKLRFVQEPVKEIESASTSLVKLTNETLGPGSTLLSDTHGTALDIQLSFIPFPGSVVSLAVRKGGSQQTLINYDQSKSALSVDRNQSGNTSFNPNVGGIHTASLSADSDGTVHVRILVDTCSVEVFGGLGEVAISDLIFPSEGSDGVALFTSGGSVMVKSAEVRSLA

SEQ ID NO: 620 - protein, 492 aa, Bacillus licheniformis
MNRIQQAEEALKKAGKKVNRRYRMGYHMMPRANWINDPNGLIQYKGEYHVFYQHHPYDENWGPMHWGHLKSKDLIHWEHLPVALAPGDEFDESGCFSGSAVEYNGDLALIYTGHNMIDEEKDDFYQTQNIAVSKDGIVFEKLKENPVIAEPPEDSTRHFRDPKVWKHRENWYMVVGNSSKENVGRVILYRSPNFVDWEYVGVLAQSDGNLGFMWECPDFFELDGKHILLISPQGIEADGESYQNLYQTGYLIGDYDEETNEFVHGSFKELDHGHDFYAVQTLLDDKGRRIAIGWMDMWESEMPTKADGWCGALTLPRELTLKDGHKILMNPVEETKLLRGSEHHECDNQSISGSYFIKTAEKLLEVVAVFDLTICSAETVGLKIRGIEQEETTIKYSLIDQKLTLDCSKSGKARDGVRNVRLEADEKLTLHLFLDRSSIEVFANHGEATMTSRIYPKEGRAGIELFSEKGNVRVEEFTYWTLKDIWKGDEAK

SEQ ID NO: 621 - protein, 512 aa, Bacillus subtilis
MTETTAHLAGGRAEETAPTMRPILHYTAKNTWLNDPNGLVWHQGVYHLFYQNNPFDNVWGNMSWGHATSTDLLHWTEHPVAIACNEEEDVFSGSIVVDHGNTSGFGTAEDPALVAIYTSAFKEGSVHQGTQAQSLAFSTDAGMTWSKYAGNPVLGRGSAHFRDPKVFRYEGPAGSRWIMVAVEAQHQQVVLYRSADLKDWEYLSTFGPANASDGEWECPDLFPLPVDGDPDNVKWVLVVNINPGAVAGGSGGQYFVGDFDGVQFTADPDSLVPTDADGNVDLRHCLWLDWGRDYYAAVSFSNAPENRRIMIGWMNNWDYANSLPTSPWRSSMSLAREIELATVDGFPRLVQRPVLPLDSGEPARTIQNMELHNSLLQLPDATPGSAQLIEAEILPGTARHIAFRLLGAPDGSAATVLSFDALTSRLTLDRRNSGNTAFHDKFSSAESAPVKLDGGALRLKVIIDQCSVEVFAQDGRVVLSDLVFPRSGNLGTDVYVEGGTATVRKLAVTSLS

SEQ ID NO: 622 - protein, 493 aa, Bacillus sp.
MSSLIAGLIEDPEDDFGYGKLTRLGTAASLAAAITVGRPILHYTAKNTWLNDPNGLVWHQGVYHLFYQNNPFDNVWGNMSWGHATSTDLLHWTEHPVAIACNEEEDVFSGSIVVDHGNTSGFGTAEDPALVAIYTSAFKEGSVHQGTQAQSLAFSTDAGMTWSKYAGNPVLGPGSAHFRDPKVFRYEGPAGSRWIMVAVEAQHQQVVLYRSADLKDWEYLSTFGPANASDGEWECPLPVDGDPDNVKWVLVVNINPGAVAGGSGGQYFVGDFDGVQFPADPDSLVPTDADGNVDLRHCLWLDWGRDYYAAVSFSNAPENRRIMIGWMNNWDYANSLPTSPWRSSMSLAREIELATVDGFPRLVQRPVLPLDSGEPARTIQNMELTTPCCNCPTRRPPGSAQLIEAEILPGTARHIAFRLLGAPDGSAATVLSFDALTSRLTLDRRNSGNTAFTISSRRLNPQPVKASTGGALRLKVIIDQCSVEVFAQTAGLC

SEQ ID NO: 623 - protein, 96 aa, Kluyveromyces sp.
KAITGTTFSLNRPSVHFTPSHGWMNDPNGLWYDAKEEDWHLYYQYNPAATIWGTPLYWGHAVSKDLTSWTDYGASLGPGSDDAGAFSGSMVIDYNN

SEQ ID NO: 624 - protein, 39 aa, Unknown
  Description of Unknown: Aspergillus luchuensis sequence
MALKVKQAKRNPVVPEPGSPYSTSQCTFAADLLHNFDFE

SEQ ID NO: 625 - protein, 99 aa, Unknown
  Description of Unknown: Aspergillus tubingensis sequence
MASNQKVRRIVLTGAVTVITIAGSLYGAGIKTGQQVTQQAQKTQEVTIDDRIDGLRSMRQNLVSKKELVEKQLRDLDVKIEERKLKNMDGPKREPPNYK

SEQ ID NO: 626 - protein, 1050 aa, Unknown
  Description of Unknown: Aspergillus niger sequence
MDELPGHLNQRASDTIAHVAAPGGQEAPVSPRKREHASGMDHESHSLGIEKLQQSRPMESRPADSGDRANGTLSRNMQRGGSATSDTMSTQERSNREEAVHRFGALVSDHELNRFPSQPTVNGDQKSGQPALPSDQALGMVFEHSLEGADSADHRTTPRTSLVDVFEGSDVASVFHRWSRNTSPVRNQDKEQERVVKLSPARMQELASSPQSIPYRAAPPESDHGRRAVSDGMHAAISPSQPDQSATLLPSEQKVTGDSVPKLRPNKDLAIDVSAATAAKQPVRSRPQGSRAVSTPNSRRQTMPTTSERLTQTWTSRGKQERASLSRESDGKHLTPSPHITGTEPALPSPMPPTIPLPPLSVPTYLQLELASGRPSPLYIHRSAMSDFPYESSRVKLERLMNFLMLPPALERVLWFGILACLDSWLHTFTILPLRFVKALYILLESWAVNLGVEFRYVTGFIFKGVGRVWRRRLRASSTDESSKIADPGRSTSEKQENGSVERESRNRATEPRKRHHKHRRQKSIPSALMPDDKADILKGLLIIATCCVLMRFDASRMYHWIRGQAAIKLYVIYNVLEVSDRLFAAIGQDVLECLFSREALERRPDGRSKVFRPFGLFLLALAYTVIHATALFYQVMTLNVAVNSYSNALITLLLSNQFVEIKSTVFKKFEKENLFQLLCADVVERFQLWLMLTIIASRNLVETGAFNALGSLSFSLGGYTSTGTNSTPLSTPPRTSSSILPQAFTIVPSSIIASFSQVNTYLPTLAQVLGPFLVVLGSEMLVDWLKHAYIGKFNNTRPAIYGRFLDILAKDYYTNAFADQNLTRRLGLPVIPLSCLFFRVSVQTYQMFITALLPQQPSSTAVEATTLSAIHSQYVPAPMPSPPPLTLRNFIPTSTAYAGAFFRQLLANTMPSPAQSVYIFTIVLILTGFVVLLILKLLLGMVLLAYARSRYKAMKLRESSSQANASSAAPADESNGTGPRGRAFAVEGSRRFGGWGVVEVNDDHRRWIYADDPEGLRRLKAKEEKDKNTKEDLNMDHVQRYEMVAKRIW

SEQ ID NO: 627 - protein, 326 aa, Unknown
  Description of Unknown: Penicillium chrysogenum sequence
MVHIIKTLAVGLLACVAHAFNYDQLYRGQYHFSPQDNWMNDPSGLLYHNEIYHLFFQYNPSGIQWGNLSWGHATSKDLTHWEEQPVALLARGHSGNVTEMYFTGSAIVDMNNTSGFRKDRKTPIVAIANIPTGSWRGATAIPRHLALRTIGDKVTLVQQPQEAWSSIVNKRAAYSHKYNSMLEGSVHLGTTSETIKIDLSFSAASTASKFAIAVRGSADFTKQTLVGYDFVNKQVFIDRTKSGDVSFDNTFASVYRGPLAADVNGKVNLSIFVDRSSVEVFGGQGETTLTAQIFPSRDAINTQLVSTGGTTKSVKIDIFNVASTWN

SEQ ID NO: 628 - protein, 578 aa, Bacillus sp.
MNQYVKKLMIVLLLSMVVLPISGKALESDLYQETYRNQYHYSAKKNWLNDPNGLVYFDGVYHMFYQHNPEGNEWGNMSWGHATSTDLVHWEEQEVAIPQAENSPWVDFWFKTDADEKPVHYIGTPTTNWDGGHPNGKKYIFSGSIIVDKENVAGFGENALLAYYTSTYQVAVRDDDTSIDPLGNYLGLREIQEQCLAYSTDGGKTFTKYQGSTPVLPVTAVPNGQTGNFRDPKVVYDDQHKKWLMPLVAGQEVTIFSSTNLKDWTYESSIIREHDRGVGVWECPELIPMRVKGTDELKWVLSLSVQAGAPAGGSGMQYFVGDFDGKLFHPLTNDTLKNPKWLDFGEDLYAGMTFSNVPDRTIMLGWMSNWAYVGEQKTTPWKGEMTLPRELTLVKNGENDYKIIQKPVKEIDQISQGNIQLGDRKIKAIETEKTSQITNFQGTQYKVSANFSWKDDLTPDNVGFKLRQSEDGSKYISVGYNPKSQEAYIKRSTDGENINRDQTKVKLEGNPKNIKLTVYIDSSSIEVFVNDGEKTLTQIVYPNPENPSDTKNLSFFASNGEVQISNAIGSHLKSIWGN

SEQ ID NO: 629 - protein, 607 aa, Bacillus sp.
MRLLTLIISLVFLASCKVNGEEVDTMIHPLSDDKTYYTEPYRPQFHFSSPTGNLADPNGLVYYEGEYHLFHQKNGTWAHAISSDLLHWNHMPIALEHDELGQALSGSVVVDEEDSSGLFEGKAGLVALYTNTEGGEAQSIAYSQDNGRTWERYGENPVIQNPGIKDFRDPKVFWHNETSQWVMVVSTDKSVTFYQSQNLIDWTYASRFGDGEGSHVAVWECPDLFRLPVDGNTENEKWVLHVSIGDNEETNGSTAQYFIGEFDGTTFTNDHDPEEVLITDYGQDFYAAQTFSNTENDKVIWLGWMANWRYPYQSPTDPWMGAMSIPRELSLVTNDQGEVRLFQQPIHWLDDLSAKQEPLQTFHVSGEKALPLKVSGTTYRYEATVRWDELTEFGVRLRHGDGMESLIGFDAAYDKLFLDRTNAGLETIVDRHGEPFPFGRRYETDYRASRGELKLTALVDESSIELFINDGELVFTSLIYTDPTNDGIEWYADGGTIHVSDSTFTYFHNVWRQPVEEGAFERLVTNVNQARLKVGEYLPLSAAHKPDYEEASGETLSWKSLDSNIVDIRNETDEGVVIKALNEGVTEIVVTNESQGLEKTIRLFITK

SEQ ID NO: 630 - protein, 482 aa, Bacillus sp.
MSNFRPNFHITPASGWMNDIQRPLYIDGTHHLFYLYNNDFDWGGNGTEWAHVESVDLKHWKRLPTAIPKYTDDAGDPWSGSTVVDKNNTAGFGEGAIIALLTMPKPDYQCTHLWYSVDGGNSFKHYNPDSSSTKPQPVMKNPTGGSDFRDPKVIWHEDTQSWTMLLAEGDKIGFYKSENLKNWEYMSGFVRTDIGVVECPDIFQINLDDDPNNKKWVLMIAANGFNYGLTTGSCYFVGEFDGVAFKPETDIEWLEKGADSYGGATWDAPYTNGNYRYYMSWMNNWAYALDLPWKVYNGNGSIVRELRLKTINGIPQIVQQPIWDLSEGFDEVLSLNNVELFKDNVIQQHDLKSYIVDLVIALDGVTKGKFGIAIRDGVNHTDLVYDVSSNEFVFNRQQSGEVIDKPEFYNLQRTTITPKDGRIKLNIVIDNSTVELFINDGEQVFSNMIFPEEDSTGFRIWTDDFMLIEKLSIKKTNENFID

SEQ ID NO: 631 - protein, 1173 aa, Bacillus sp.
MKKLFRKIIICGAALGVGFAPPSSSAAAEQGYYMENHRNQFHFSPEASWMNDPNGMVYYEGEYHLFYQNNPFDTRWGPMHWGHAVSKDLVHWEHYPIALSPDENGAIFSGSAVIDYNNTAGFGKEAMVAIFTHEGNKQVQSLAYSNDRGRTWKKYEGNPVMPDPPIRDWRDPKVFWHEESGKWVMALAAKNSVMIYSSPDLKKWTYESTFGPDEGSVQATSLGQRTLALSPQTGSDFEYKGTISVREKNTRVGAGGLLFRFDAEGKNGYTAEADLRNGQLLLKRINDGKEEVLKQVRLSDSLMKADAIELKVRAEKENIRVYADGVLLLEASDPSFENGYFGLVNDSALSVFRDVSFKNQSNFQTNLTRWQEVSGAWKKTLFGMKPKNKGTNVYLSSASESQFSYSAKLAFNTKGIGGLLFRADEAGKNGYLAELDGGRRIIKLIRIEGGKQQVLGIKAISVQNGTADLNVEADGAELSVMVNGEKVLAHRDSRFTAGALGIVSQGENMTFQNVRKQSFVGEVPEYIENPDFEKGTLEGWTPLEGTAFTDKQVSPADTYWGGPFDHQGRYHLWGAAETGDDPTGSVRSSYFKLSGSGEINFLIGGGNDRENLHVSLVRASDNRELIRSHNYRFNDDEKYRRVVWDASSYLGEKVYIKITDRKSGGWGHINADDFHVYNEGPVPEKPENDPNAGPGPLYEQKSSGALTVWNPLGGEWTTATEGSYGGIWECPELIQIPVEGEPGKKKWVMMVSINDGAPAGGSGMQYFTGDFDGKTFTNDHPPEKILWADYGADFYAAVTWNNTPGEKPIWLGWMSNWQYANDTPTSPWKSSMTVPRELVMSKESDGYRLKQAPVAQLQNLRENKVEYINKEIAPGENLLENVTGDTAEIETEFAAAGAEEAGIKVRTGGGQYTKIGYNPEKQTVFIDRTHSGFDFGPNVRKVHEAPVKAENEKIKLKILLDRSSIEVFVNDGEKVLTDQLFANPESQGMEFYTVNGKAQIDYLRVFDVKGIWGESPFRTNLTDFKPLDGQWGDTIAGKLGRSSADSFNISGTKAKDFTYSAKIRVLNEGAGALVFRADRSANNGYFVNIDTKHNVMKLMKRSNGSIQILKEEPHPFESNKEYEVKVTARGDEIQAFVNGSAIIKAFDSEFAEGYAGLNVWNATAVFQDVRLEQ

SEQ ID NO: 632 - protein, 1198 aa, Bacillus sp.
MKRKISALLISLTVLGCPFTSVSAAEDSGYYQEPFRNQFHFSPEANWMNDPNGMVYYDGEYHLFYQYHPYGTTWGPMHWGHAVSKDLVHWKHLPIALSPDENGDIFSGSAVIDWNNTAGFGKEAMVAIFTHSGEKGQVQSLAYSLDKGRTWEKYEGNPVMPNPPIPDWRDPKVFWHEDTSKWVMALTAKDKVMFYTSPNLKDWEFASEFGPDGGIQANSLDRTSYAMSSQAGGSFSYNGDITLNEKNGREGAGGLVFRADKDAKNGYVANLDAKNDVVTLSKNVDGISKEIARKQLTLKTSTTYQVKIDTNGDQIKVAVNDQFVIEVNDPTFESGYYGLSAWNSTAAFRNVEFNNKSNFVTNLSKWKVIGGTWEDTLAGKNGSSADDAFIMSGQTADDLLYEANLMISGDKGGNGAGALVFRADADAKNGYVANIDVLNDTIKLMKTENGKITVLAEKTRSLDTDKAYHLKVSTYGENIKVYVDGDLVHDINDATFSSGYVGLNIWNSSTNFQDVQLNKNIITNEKEIKNHDFETGDLTGWSTIEGNAFTNDHVTNTASYWGGPFGHEGNYHLWGFSDLQGGDDATGELHSSYFKLGGSGEINFLLGGGNDISNRYVSLVRASDNKELIRQANTKFNDEKYNKYVWDASDYIGEVLYMKVVDQAEGGWGHINLDDVHVYNEGPMPTEVDNVAKEPVEAEIKQSGTLTDWTAVSGEWIPSTQGSNGGIWECPALVELPIDGDPTKTKWVLQVSLNDGAPAGGSGMQYFVGSFDGKTFKNENPSDQVLWTDYGADYYAAVEWSGIEGENGEKYWLGWMSNWHYANNTPTSSWRSSMSLPRKMELTQTEDGLRLKQTPVSINSIRDNSKKVSYKNKVISNGSNLLDDFSGDAFEMIAEFDVSNTKSTEFGFEVRKGSADEHTKIGYDVANKQLFVDRTKSDSFDYGSSIVDMHDGPLSVSDGTVKMHIFVDRSAVEVFGNNGETVITDQIFPSPTSKGVKIYSKDGNVTLKSLNIYPIKSIWKKSGFKSTIKSWKSVNGSWADTIAGKQGQSSGDAFTLSKEAGSDFKYEADIKILDTDSHPNDPNKDRVGNLVGAGALVFRSDSEGKNAYAVNVDVKHNVVKLIKFVNGVGHDLGTYNNDGKLKLEVNKSYHLKVVTVGESIKAYLDGKLVIDKNDQTYKEGYFGLNVWDSTVVFNHVKK

SEQ ID NO: 633 - protein, 477 aa, Bacillus sp.
MIKKDQVKYRPVYHFTPEKNWMNDPNGLVYYKGEYHLFFQHHPFGTKWGPMHWGHAVSTDLVHWRELGIALAPDELGAVFSGSAVVDWQDTTGFFTGGEGLVAIFTHADTYPGSDRPRQRQSLAYSTDCGRTWVKYSGNPVLADEQISDFRDPKVFWHSESDRWIMALAAGSEIRFYSSGNLKEWQFESAFAGSDADRCGVWECPDLFPLQDGGEEKWVLIVSIGDSPEYGSRTLYYTGTFNGHRFEPAESARWLDEGRDNYAGVTWSDCTDGRRIYIGWMSNWRYANETPTEGWRSAMTLPRELTLQNGILHQKPVKELANLRGRRQQFRETVLQPESPITLSCGGSAEIIAEFKLLTAREFGFRFRTSKDTETLVGYHVPREELIIDRTASSGAPFHDFYPSIDRVSMPPVQSTVKIHLFLDSCSIEVFGNGGKLAMTHLLFPDGSHYEAELYSVGGEIIVKRLDCFELAASIEM

SEQ ID NO: 634 - protein, 203 aa, Bacillus licheniformis
MKKAVYKRISILTVCLGIFIMIFLSVRETEKKGESPDTPEYRAAFHLTTPDKWKNDPQKPVYFNGEYHYYYLYNRDYPDGNGTEWRHAVSDDLVHWQDKGVAIPKYTNKNGDPWSGSVVVDSKNTAGFGKGTIVAVMTQPSANDGKEEQFLWYSQNGGKTFKPYGEEPVLPNPGTVDFRDPKVIWDEQDDKWVMALAEGTKVG

SEQ ID NO: 635 - protein, 604 aa, Bacillus sp.
GPMHWGHAVSKDLVKWEHLPVALYPDEKGTIFSGSAVVDRHNTTGFQTGTEKPLVAIYTQDRDGEQVQSIAYSNDKGRTWTKYSGNPVIPNPGKRDFRDPKVVWHKQTKKWVMVLAGGDRILIYTSPDLKHWTHASEFGEGEGSHGGVWECPDLFELPVEGRPNETKWVMQVSVGDGAVSGGSGMQYFVGSFDGTTFKNENPPNRVLWTDYGKDFYAAVSWSDIPRSDGRRLWLGWMSNWQYANDVPTSPWRSAMSIPRELKLKAFSEGFRIVQAPVTELKSIRGASQMWKNKIISPRNRNFLKALSDNAYEINAEFQVNTGTAAEFGFKVRTGENQYTKIGYSKNSASLFVDRSQSGNVSFNPNFNTGKHAAPLQPVGGKVKMRIYVDRSSVEVFGNDGRQVITDIILPDRSSKGLEVYASNGFVKLNSMTVHPLKNVWGTSPFQSNLTGWTTVNGVWADTIDGKQGRSDGDSFILSSAKGTDFTYEADVTVKDGNGRGAGALVFRADKDVQNGYLANVDAKHDVVKFFKFENGSASVIAEHRTPIETGRKYHLKAVARDSNFHIYLDGRLVISARDSTFTEGAFGLNAWDATAVFQHVYADR

SEQ ID NO: 636 - protein, 478 aa, Bacillus sp.
MTENFRPLYHITPPSEWMSDVQRPIYINGVHHFYYLYNKDFSIGENGTEWRHATSTDLVHWKDEGVAIHKYGGNPAGDPWTGSAVVDTNNTAGFGAGAIIALVTMPPEYQSTHLWYSTDNGNSFSYYGLVQYNPTGNADFRDPKVIWHEPTQKWVMLMAELDKIGFYTSTNLKDWVYVSSFVRQDIGIIECPDLFQINVDDDPNYKKWVLMPCANGFNYGHTSGSAYFIGEFDGISFTPDPGTDVQWLDHGTDCYTGVTWDAPYCNGNYRFYIAWMTNWEYTRELPYENYIGNATIVRELRLKSTTEGLRMFQTPIWGIRDNFQDISFWGDQIITSQQAKILDGVTSYSIESSFHIDDLTNGLFGISVRDGNGTHTDITYDKELNELVFNRSQSGLIIDDAMFTKPRIVKNVFPLNGKIKLDIFVDRSTVEIFVNDGAYVLSNLIFPQLSSDELRLWTNDTVHLEYFKVKTLNQSLIG

SEQ ID NO: 637 - protein, 503 aa, Bacillus thuringiensis
MRRQLLAVALAALCTAPLAPSARAEEARPGYHFAPARNWNNDPNGLVYYEGEYHLFYQYNPYGDRWGHMSWGHAVSRDLVTWQELPVAIPETDVQAFSGGVVVDWNNTSGFGKDGRPPLVALFTGHNTKTRIQSQYLAYSNDQGRTWTTHGKVLDIGSTEFRDPKIFWHEATKRWVMLTVIAAENRVLVWTSGDLKSWTMASSFGPTGARGKNWECPDIFELPIEGGKPGEKRWVLAISLGDSSVNGGSGMQYFVGDFDGQRFTLDPSWTGDPQWLDWGADYYAAVTYNDLPKSDPRKIAIGWANNWRYANLIPTYPNRGLMSLPRSLSLHKTSEGYRLYQAPVAEAEALRRDHSSAEGLKLGEASQPLPVKGGRAELVIDLDTGSSQQVEIAIKDAQGYQTLVGVTAPTGEVYVDRTRSGPSFHEGFPDRHIAPVDLKGRKVKLHLFVDESIIELYVNDGARTITDRFFRGGGELSWSVSARGGEATIETLNAWTLSDPRKK

SEQ ID NO: 638 - protein, 1203 aa, Bacillus sp.
MNDFFKWMGVILMLCSLWTYSSISGSAAKESDAIFGYTQLSGKWKQEKEGKMKGEAIKKSPALMISVDKRGGYAEYESTITAEERASFLLGADERGLGGFEVQLDVKGDGISLISRSDEKVLEKVRHTLKSKKEYSIMLRTDLGTTSLWLDGKQVMDRVKTGAITGHYGFLVEKGEGHFRQATVNEWRSNLHGVEMEGWKLTPDGLESNGGGQPLMSGTKAGVVAFETRLHLSQADSSASLIFRGDAGGMTGLKVEVDGKGDQIRLMDSKSEETLQTVSVKIQDDTLYHVKIVDEGEKVKVFWQEGDEPLLTEENVDPTAGYLGFTADTGTVLQDVRVSGLEGNLEGWTSDRGEWLPHLQGIMGRSNGEDNAFRMSTTEGDDFILEGDVTIHEDTPYGTAGFIFRGNGVSGYMLQLDPNLGRVRLLDLEGDRTIGEMERDLAPGATHHVELHAVGSSIKVYVDGYDEPVINVTDTAYSRGRFGLNTYNGSAIFQHVYATPHEDYFNELYRPQYHYTQARGYASDPNGLVYYEGEYHLFHQDGGKWAHAVSTDLVHWKRLPIAIPWNEMGHAWSGSAVIDHDNSTGLFPVEGSGMIAYYTSFNPSKPNGDQKVGMAYSRDKGRTWQFYDGNPIIPNIGEFYGSAGWDFRDPKVVRDEDRDQWVMVISGGDHIRFFTSKNLLDWEMIESFGYGDYVRGGVWECPDFFKLPVDGDEDNQKWVLSISMGANPKTEGSDTEYFIGSFDGEKFVSDHPAGTVLKQEFGKEMYATMSFSDIPDEDGRRISIGWMSNWDYPFAYPTSPWNGQMSLPREWRLKTNDSGDVRMVQSAVDELKGLRDGTKTFGGITLTPDSENPLSHETGIAYEIVADLEMVGEEAAFEIGLRKSRDQETMVGFNRSEGKIYFDRSKSGEIDFSDKFSKRHEAELDPVDGRLKLRIFVDGSSVEVFAGDGEVAFSNLIFPDGASDGMSLLATSGKVKVHQFDVHPLKNVWKESGKEHLQMDHDRIALRKGESHTLSVRSTTKSSISWSSSNQEAVAVRATKKGEAEITMKGNGRSIITAKSKGGKLMGETIVDSLDTYTIQEGSRGLSTNPSAQNGSKVVMGRPLQLWDFHVLPEGGYKVTATDTGKALDASGGSKGDAVQLWDYLGYKNQQWRVTPHGDGSYSFNAINSGRSLRPSGDPMTNDVELDGVGVTQAVRWRMIEAN

SEQ ID NO: 639 - protein, 1192 aa, Bacillus sp.
MKRTVKKLLMIGVACSISMFSVYPVLADNTGYYQEKYRNQFHFSPEANWMNDPNGMVYYNGEYHLFYQYYPYGTTWGPMHWGHAVSTDLVKWKHLPVALSPDENGEIFSGSAVIDWNNTAGFGKEAMVAIFTHSGSKGQVQSLAYSTDSGRTWTKYEGNPVMPNPPVPDWRDPKVFWHEQTKQWVMSLAAKDKIMFYTSPDLKNWKYASEFGSDGGIQANGQSGAYSYTLSEQKGQSFTLEGEIMLVEKNGREGAGGLVFRSNKDATNAYTVNLDAEKNLLTLNKVEKGSVTTVVSKPMRLDTSQAYHVKVEANSHHFKILLNGKQVLEGSDASFENGQFGLTAWNSTAVFRHVKFTNQSNFITNLSNWKSITGTWNDTAAGKIGKSNSDGYIMSEEQGDQFIYESNMTFLDENHGSGALLFRADAEAKNGYIASVDASKDTIKLVKLQNGISTVLAETNEKIDTSKSHQVKVTASGNELDLHIDDNFTLTAKDETFSKGLFGLHVNQSSVRFQDVNMTKFIDTDEKEIKNKSFETGDLTGWKTIKGNAFTNDHVTDATANWSGLFEQKGKYHLWGFSDKQDGDNATGELHSSYFKLSGSGEINLLMGGGNDPTNRYVALVRASDDKELIRQANTKFADEKYQRYVWDASKYIGEVLYIKAVDQAVGGWGHINLDDVNVFNTEKMPEKVDSVAKEPEEAKQREGGEISDWNTVSGEWVNSTHGSNGGIWECPTLLELPVDGDSTKKKWVLQVSINDGAAAGGSGMQYFVGDFDGKTFKNENPPEEVLWTDYGADFYAAVDWSGVEGDNGEKYWLGWMSNWQYANNTPTTTWRSSMSIPRKIELTNTAKGLRLKQIPVSIDSIRNKQEKKVLKNLMVVENKNLLSGIQENKCEIIAEFDVSNTDAQEFGFQIQKEGSENTKVSYNVNKQQLFVDRTNSGNFDFGENVKGKHSAPMLPKDGKVKLHMFVDQSSVEVFGNDGTEVITDQLFPTLSSNKIKLYSKGGAVKLNSLKMYPLKSIWNKSPVDTNLSVWKNISGLWADTINGKQGRSKEDTFTLSSKEAKNFTYEAKIKVLDDPVSNSTGAGALVFRSDEQANNAYAANVDVLNNQIKLIAFRDGIGKDLIIYDDGGKLDLKTNTDYHLKVTAEGEHIQVYLDDKPVIDTMDPTFSEGYAGLNVWNSTSLFNEVKFETVD

SEQ ID NO: 640 - protein, 1193 aa, Bacillus sp.
MLGSLWTLSGTSGSAAKGDDAIFGYVPLSGDWKQGKKGNVDGEARKKAPALMVSADKKGGYAEYETAITADKSASFILGADERGEGGVDIQFNVKKDSVILMSRSDGEVLKKIKHALRSKKEVSIKVRTDGTTASLWLDGEQVMQGVETGPVHGHHGFLVEKGKAHFRQTTVSEWRTNLDGVKIGSKGWAFTPDGLKSVKTNQQLLSATKAEDFSFETRLYLTESDSSGSLIFGIDATGEGGWQVEVDEKRDLIRLVDLKGGKILQSVSTGIQEDILYHVKIVAESGKVHVFWGEDPGPLLTDEEVGTTEGYLGFAAEKGAVFQDARVSGLEGNLKGWTPDRGEWLPHLQGVMGTSDGEDNAFRMATTVGNDFILEGDVTIQDDSSYGTAGLIFRSDGASGYMLQVDPNLDRIRLLDLKGDRTIGEFKRELSPGQTHHVELHVVGASIKVYVDGYEEPAIDVVDPAYSEGRFGLNVYNGSAIFQHVYATPHEEYYSELYRPQYHYTQARGYASDPNGLVYYKGEYHLFHQDGGKWAHAVSTDLVHWKRLPIAIPWNEMGHAWSGSAVIDHDNSSGLFPEQGSGMIAYYTSFNPSKPNGDQKVGLAYSKDEGRSWQFHEGNPIIPNIGEFYDSGGWDFRDPKVVRDEERDQWVMVISGGDHIRFFTSKNLIDWEMIDSFGYGDYVRGGVWECPDFFPLAVDGDEGNQKWVLSISMGANPKTDGSDTEYFIGSFDGKKFVSDHPAGTVLKNEYGKEMYATMSFSDIPKEDGRRISLGWMSNWDYPFAYPTSPWNGQMSIPREWELKTLADGEVRMVQRPIGELKGIRGNKTSFGGISLSPDSKNPLAGTTGIAYEIEADIELLEDDSGFEIGLRESGDQETLVGFEGAGQTMYVDRSRSGEVDFSEKFSTRHEAGMDPADRRVKLRIFVDGSSVEVFAGDGEIAFSNLIFPDGASDGMSLTSTVGNIKVHQFDVYPLDTVWKEANGERLQMDHDRLSLKKGESHTLSVRSDSSSTIQWSSSNPEAVEVRDKGTGEADITMKGSGRSIITAKTKGGKLKGETVVDSREAYTISRGVQGLALESPVENGSTVLMGDPVQRWEFSLRPGGGYSVTAIDSGKVLDASGSMRGDALQVWDDLGYRNQQWQVTSLGDGTFAFNVLNSGRSLGALDKAHGGGVVLHEVGMEKRRGWRIIGKE

SEQ ID NO: 641 - protein, 1224 aa, Bacillus idriensis
MKKMTLLKLAAAAALLFSLFSLEGFRGAAIERKTAIFGYSALSGNWTKESDGSLKGSAAKNQPALILSDSETGSFFVYEATVKLAKNTTGSLVFRANQRGTEGYKFSLDAKKDRVSLSSLNGDRMLKTVPLKVKNHSKVKIISDGPSINVSVDGKNVMDLQDFSHSKGFTGFHAEGGKLVFSQVQLKELRTNLRGLKTITGKWEAASEGLEAAPDQGENLYSISSTLSADFILESDLLLKDKAAAGSLLFRSDKTGLKAYQVKADAKNDILQLMDTRQKKVLAEAKMPIEPGMLYRVKVKAEGSSLQVFWQNGGTSVLKAEDDSYTKGFLGLHASGDAVFQNIQVSDLQSNLEGWQSVNGEWTPHLDGTAGTSQAEENTYRMAQTAGADFVLEGDLKIDAEAPYGTAGLVFRGKADGREGYMLTLDPNLNRIRLLDLKGDRTLGIAERELETGKIYHVEIHAAGDDLKVYFDGYADPAISVKDSAYSSGKYGLNVYNGTAYFQHVYATPHDDYYSELYRPQYHFTQARGYASDPNGLVYYEGEYHLFHQDGGKWAHAVSTDLVHWKRLPIAIPWNEMGHAWSGSAVVDKTNASGLFDEEGSGLIAFYTSFNPEKHNGDQKIGVAYSKDKGRTWEFYDGNPIIPNIGEFYGGEGWDFRDPKVVWDEDHKQWVMVVSGGDHIRFFTSQNLLDWEMIESFGYGDYVRGGVWECPDFFQLPVDGDPSKKKWVLSISTGANPKTDGSDSEYFVGTFDGNRFVSDQPAGTVLKNEFGKEMYAAMSFADIPAEDGRRISLGWMSNWDYPFSFPTSQWKGQMSIPRELTLKTVPGEGIRLFQQPIEELEQLRGQASSWSSKTVKPGGSNLLANVKGTSYELVAEIELPVNSKAEFGFGLRESDSQKTVVGYKAGESSMFFDRSESGDISFSDKFSTYHETNVTPKNKRVKFSIFVDESSIEVFGNDGQAVFSNVVFPDGASDGMSFYTKGGSVKIVSLDIYPLKGVWKEESTDPAAIVMDHETLSLPLGGVHKLSASVSGKHQKIKWHSSNPEAAEIKKVDERSAEVRLTGHGRSIITAASKNGKVLGRTIVESKATFKIAEKTTGKILTPEGNSNGSKAKLQPSGEHSWKMEGVSPGAYKVHAGDSKFVLDASGVSAGDDVQIWEYFGYGNQQWRITDLWDGTYRFSAVNSGKVLGVKNNRPENGTIAEIQNAGGGEFQEWKLIDASDTQK

SEQ ID NO: 642 - protein, 1268 aa, Bacillus sp.
MKPTLIKWTSVFLSIVLIAASIGTILVDPTTGWATESNETGSKETREGATIIESVSKAITNLTDWQIKGKGTLEDTEQGLLLTSEPKENVMAISSVNSEDFIYESDVKIIDMNADATLVFRSSEDGWDSYMLQIVPNAGIIRLRDARDERKFKEERQVKLQEGGIYHLKVKVVEDNIKVYWENKYAPIIDVKNNSYEKGFLGLNVWGGAALFQNVKVSELSTNLGPSIYKEGSWEPAIKGLKGIAVDGVKAKQIYNKSASDFVLEGNVSFDQNPSEAALSFRTNERGTTGYQAVLIKEGSTVRAQLKKADGSVLKTSDRTYKTHEGTKHHLEIITNGNKIEFYVDGYSEAALKVTDMSYKTGFAGFTVTSGSAYFQDIYLVPTSSYYKEKYRPDYHYTPARGSVSDPNGLVYYEGEYHLFHQDGGTWAHAVSKDMVNWKRLPIALPWNDHGHVWSGSAVADLNNASGLFTNSGGKGLIAYYTSFNPDGPNGNQRIGLAYSSDQGRTWKYSMESPIVIENPGKNGEDPGGWDFRDPKVVRDDANNRWVMVVSGGDHIRFFTSTNLMDWKLTDNFGYGNYVRGGVWECPDLFELQVDGTGEKKWVLMISTGANPKTQGSDAEYFVGHLTADGKFVNDNTAGKVLKTDYGKEFYASMSFANMPDNRRVIMAWMTNWDYPFAFPTMGWKGELTIPRELRLVKTDEGIRLAQAPIKELQSIRSTIFQTQNKVVNPTNASNLLKGISSGAFEIEAEIEIPSTSKLTEFGFHVHEGADQKTVVGYKTADNRIFVDRAESGETDFSRLFSTLHEAPLKQDNKRIKMNIFVDDSSIEVFANDGKVVFSDVIFPDPSSRSVNFYTKGGDVKVVSLKVHSLADTWNQNADEDTRIVMDTNQREMNIGDFLPLFASVDNGKGKGTQSIIWKSSNSNVVKVDSSTNSKAVLKAGSKGEAIITASTPNGKASASVVVRVYEGEFHTNLTGWKSDLSASKWTITENGIRGTHTSDANYMAKETAGDFTYEADMILGQTGGAGSVLFRASEDGRSGYYFNLDPNMKAFRLFYKIDDGFEERMVIGKVPALIQPGRTYKVRIEAKGPHIQIYVDSQKIMDLQDGTFAEGHFGLNVFGGQATYQNVNVSNVSEANLTVTSFTNIATGKAIYTANSQNGEPVTVADAEKATKWTLIPTGDEHGSYSIRTEGGKALDMDTGQNKIQLYNYLGYNNQRWIITKNDNGTVRITSVHNGKALEVSREGILTLNDLNPNPERQQWTLSSDIK

SEQ ID NO: 643 - protein, 1890 aa, Bacillus sp.
MKRVIRRSIPLLTIAVLILALFPTYPIAEEGGQESEAAAIDAYRSQFHYSPSENWMNDPNGLVYFDGEYHLFYQHNPTGNQWGPMYWGHAISKDLINWEELPIALYPDEKGFIWSGSVVVDEQNTAGFQEGEHAAMVAVFTHEKAGHQTQSLAYSNDKGRTWTKYEGNPVIEMPEGTDVFRDPKVFWHEGTEKWNMVVSAGQSIEFYQSDNLKDWEHTDTFERPPGASGVWECPDLVELSVEGDGSDKKWVLMMSVSEGSSAGGSGMEYVVGDYNGESFSTEMKPIPLDYGADMYAGVTWNNLPKEEERTIMVGWMNNWQYGQDIPTEGFRGAMSIPRELNLRTTEEGTYRLQQQPVSELEQLRGETLERKEEVVKEGTQKLGDSVNDLLEITASFDIKQSSADSFGFTLKNENDQSTTIVYHPKEEKIALDRTSSGEKDFSADFAAVHEAPLEGKDEIVQLRILLDRSSVEVFGNEGTTVLTDQIFRDLSPSTLEIFSTGGEAYLRHLTVTDLSAADVAPVPTPVPEDVPNNLENGSFETGDLTGWTANGDAFSHGVSQTESYWDGKPFEQEGKYHLWGFSEDVNDSDFRTGTLQSDLFQLSGKGQIEFLIGGGQDKERLYVALVRASDGKELFKATGANDEKYRRVSWDASAYLGEKLYLKVVDYHTDGFGHINVDDFKVYAEGEPIRDDIENGDFETGDLTGWTVVEGDAFSTKDVTNDMDWEWGGPFHHQGDYHLWGAKDGGDGQTGILRSSSFILSGTGRISYLIGGGNDPDRLYAALVRAEDDQELMKATNTEWDDSEEYSQVVWDASQYVGEEVYLKIVDNSTEGWGHINVDDFQVKQTGLLAHWSFNEKEGKVTKEEVSGESDPVQYVFNDAVYKASSDPLWKPGLAGEALLFDGYSTWVTHADESFVQPEDALTIEGWVAPRAYEWGDLNQVSAIVNKHDKAKGEGFILGMGRHGKLSFQAGINGEWQEVSTKPEHRLEKDQWSYVAATFDRNDQSMKLYMNGALVGRTETPNGKLSMSSEDLLIGKHNQAALINGVFDANMFNGLIDEVKIANEAKTADEIQQEYQSMVENFPDQTLPEPSMDWDRTRYNGDQHRPQYHFMPPEHWMNEPHAPIYYNGKYHLFYQKNPQGPYWHHIHWGHAVSEDMVQWEELPTALAPDAGTVAPDGVWSGSATLDENGEPVLFFTAGDDSKFPNQMTGLAVSEDPEDPVLKEWRMLDEPVTVQEENLPAEEGDVMYGQFRDPFVWKDGDTWYQLMGSGIEQVGGTALLYSSKDLDNWTYEKPFFTGDAEAYPKTGDVWELPVFLPLGKDESGEEKYAFFINPWFDGYSPHNVKYTFYWVGTWDKETLAFVPDHEEPKMFDYGEHFTGPSGMVDEDGTPILFSIAQDKRSEQEHYDAGWAHNAGLPVELSLRDNNDLGLQPIKELEVLRGQSLVSFKNKGIEEANERIKDAEGDMLEIVLDIDPKQADKVGIKVRQSANGEEETLIYYDKTKETFAMDRNRSSMDPDVNKGVQGGELKLNGERWQLHLYLDRSMVEAYANGQKSITSRVYPTRYDALGIELWSEGGDPEIVSMDVWEMKGAFGEAAPVYEKETEAVPSHGELENHDFQTGDLTGWNIVEGDAFSDAHVTKKADWGWGGPFDQAEDRIDPERHHLWGFLDSSGGDAATGILESQIFELGGDGKIDFLIGGGSNIDQLSVSLVRTSDGKVLKEATGRNQETYHRVKWDASEYVGEKLLMRVTDKAQGGWGHINVDDVNVPVALSEEEKILDKLKEMDLQSGKDLDEKIEFYQDTEEKIEEKEAAFISVKKEMIDFLEKQLEKKRKEYDLSSIQLHFYVKHAIEETGARQPSDAGEVQKYVRKRVNKHATGKQVRGAIQKYLK

SEQ ID NO: 644 - protein, 491 aa, Bacillus sp.
MIQNQPLATNGYYQERYRPHIHFTPEQMWMNDPNGLVYFEGEYHLFYQYHPNSTKWGPMHWGHAVSKDLMEWDHLPVALYPDDLGMIFSGSAVVDHKDTSGFFDGKPGLVAVFTHADGELQRQSIAYSKDRGRTWIKYDSNPVIPNPGIKDFRDPKVFWHENTEQWVMVIAAGRKVQFYVSPDLKQWTYASEFGDGWGEQKGVWECPDLFPLTNEKSGEKKWVLPIGIDAGAPSGGSGTQYFIGEFDGRHFVPHQSKESVRWLDYGKDFYAAQSFSDLPGRRVVLAWMSNWQYANDVPTDPWRSAMTIPRELTLTMIEGRELLIQKPAAELTRLIERRMEMDPCLLQEKQSIAMSQPASPFLWELEVEIEEGGVFEGRLFGKQDAGLRIRVDRGKSVISVQRDEADLDFSEEFVCTCQAPLNPDLSSFHLKLVCDHSSVELFLGEGEISMTNLYLPTVGHEAKLKVEAVRGAVEVKGSSVSEMRSIWKHDM

SEQ ID NO: 645 - protein, 515 aa, Unknown
  Description of Unknown: Aspergillus alliaceus sequence
MLAFRGFSLLSLALFASTVPLAASQARPSYHITPETKWMNDPQRPFFLGDEWHFYYLYNSDFDSSNPGSGGTEWYHVTSTDMVNWTRQGVAIKKYKPNPPKGVNLGDIETGSAVVDKDNKAGFGKNAVVAIVTQMADGVQQQSLFYSTDNGNSFAPYTGNPVLPNPDPNAKPAFRDPKIFWDGEAGNWAMSLAEGNRIGFYTSPDLKAWKYTSSFTPNTGVNLDPLECPDLYQIDLDGDSKKRTWVLAAGAKGSTVYWVGKWDGNGFTATDAKPQLMDNGPDFYATVSWDNPKDIYGSRYAIAWMNNWEYAASLPYYGDFAGQTSMVREVKLKTINNSPTLVSSPIVGYEGIFGPAKSVSNKTITKDPKSASLPSDLTEDAYVIRATISKTDSDDGNEVCFRIKSDGSFSTTIGYNFKKSQAFLVRDSDGSATDSMPSGPKKAYDTVATAPNPSGGNTVKLEMYVDSNSVEVFVDDGVDVLSGLIYPNKAAKGVLVVSDTGSLTLVSFSYAGYKA

SEQ ID NO: 646 - protein, 635 aa, Unknown
  Description of Unknown: Aspergillus alliaceus sequence
MGLLLLCSLLLGVAAERNWINDPNGLLFHNNVYHLFYQYNPNGTEWGALSWGHATSADLSHWEHQPVALLARGYSDMITEMYFSGSAMADVNNTSGFATEDGQVPLVAMYTSFYPHAQLLSSGKRVRNKQQSQSIAYSLDNGTTWTQWDAGNPVILDPPSPDEAEYEEFRDPFVFWHDATQTWLSLVAISKQHKIAIYTSTDMKQWTYRSTFGPFNAVSLNPGGPPGTVGSATQYVVGSFDGTRFTPDTEGIFSEGATSPPADSVVFEDFEGDGDFESLGWTTTGALVGTSPAQGALGGQQNITGFLGRRLLNTFLGGDQTTGTLTSPSFTISHRYINFLIGGYFNGTSHIMRTATGHNSERLEWSGWDVSALQGQTATIEVVDMATGGWGHITVDEILFSNTTLARSQTANWMDFGPDFCAATSFNGLPRDKRINIAWMSNWQLSLKTVNHKPTLVQEPVGAALFLRPDGGNDSNYTTLTWDIIPRGTIEQLPVSDQAVEIQLLISAVAAVAQEGQFGIIALASPDLTKQTRIGYDFGSKEVFVDRTRSGNVTFDATFPELYRAPLPEVDQEGMVSLRIFLDCSSVELFAGEGVTSLTARVFPTEDAREMYLFSEKADTEKVSLHVRNVASVWK

SEQ ID NO: 647 - protein, 232 aa, Unknown
  Description of Unknown: Aspergillus leporis sequence
MIGLDKVKGRKPIFDGVRTFVGYGEGEDQLRLIDWDRRIDLFTLSQDMNWMNEPNGLIKIESTWHLFYQHNPTANVWGNINWGHATSIDLVHWDYKPIAIANENGIEAFTGTSYYDANNTSGLGTPEDPPYLAWYTGYTASNGTQDQRLAFSLDHGATWIKFQDNPIIPRVQEEPHDSTGGLEIRDPKVFFHNPSEKWVMVLAHDGQNNLSFWTSTDAKNWTWESDLLSTQI

SEQ ID NO: 648 - protein, 306 aa, Bacillus licheniformis
MKKRMIQMGIIGAMMFPEAFSAAAADPDYYNEDHRPKYHFTPEANWMNDPNGMVYYAGEYHLFYQYHPYGLRWGPMHWGHAVSKDLVKWEHLPVALYPDEKGTIFSGSAVADRHNTTGFQTGTEKPLVAIYTQDRSGEQVQSIAYSNDKGRTWTKYSGNPVIPNPGKRDFRDPKVIWHEQTKKWVMLLAGGDRILIYTSPDLKRWTYASEFGEGEGSHGGVWECPDLFELPVEGRPNETKWVMQVSVGDGAVSGGSGMQYFSAVLTEQPLKMKTRRIAYYGQITAKTSTQLSAGLISRSQTDEGFG

SEQ ID NO: 649 - protein, 1376 aa, LactoBacillus sp.
MEMDEKKHYKMYKSKSVWVFACLSTCLIVSFFNDGQNVSAATSASSTQISQTNTGSQPNNETTGETAQSSVNSTATASSSSVADLPSSSDSKSSIGSTISQPTVDKKETSKSDTADNDLTKSVTTSDSDKALPTSKTTLPTSNEQVQSSVGQSQTDQSASSATIATNAVTSDVSQNDQYNEPYRNQYHYSSSQNWINDPNGLFYDSKTGLYNLYYQYNPEGNQWGNMSWGHAVSKDLINWTQEDVAIPMLQNQGWEDFTYTNTTGSLKDKGEVRYVGVPTTNWGDADGKKAIFSGSIVVDTNNVSGLGKDAILAFYTADYQIATRKNDGAEDGWGTWIGLTEIQEQHLAYSLDGGKTFIQYSKDGNAANPQAIIPTSMNQGGDAANFRDPSVVYDAVNKQYYLTVVSGQQALIYKSSNLLDWTYASKIERENDVGNGVWECPSLVPMKVAGTNETKWVFCISVQQGAHATGSGMQYYVGNMTADGTWVPESSKTLQNPMTMDSGEDFYAGIPFSNMPDGRTVMLAWQSNWSYVDEAKTSPWSGNMTLPRELSLKKNADTTDGYLLTNTVVKEIANNEEANVINKAESNFTVSRSDEQVQYEGKQYKISATFSWDEADKPKSVGFKLRVSDDQKYDMIVGYDLTTGLLYVQRLNTGEPNMGAPRDKMNATVNADGSITITVYVDETSIEAFANDGEKSITQNFFMRPENIGDQATTGVYVYSNDGTTKISDLTINPITSIWNSTGQLTEKFVDENGNTIASDKIQTGRVGQSYTSESATIPGYVFVKENTDHINSNQLYTTQNQTITYTYRASQASVVTKDTTLAAGPSAAWNAADNLVGATDADGNALAVSDLTVNGAVDPKTPGTYTVTYSYTDATGNKISKKATVTVIASKADIVTKDTTMVAGASTIWNAADNFVEAKNADGNALTVSDLMINGTVDSKTPGTYTVTYSYTDAAGNKINKEAIVTVIASKADIVTKDTTMVAGPSAAWNAVDNFVEATGADGNALALSDLTVNGAVDPKTPGTYTVTYSYTDPAGNKISKEATVTVIASKADIVTKDTTMVAGPSATWNAVDNFVEATGADGNALALSDLTVNGAVDPKTPGTYTVTYSYTDVAGNKISKEAIVTVIASKADIVTKDTTKVAGPSATWNAADNLVIATDAKGNALALSNLTVTGSVDSKTPGTYTVTYSYTDAAGNKISKEATVTVIASKADIVTKDTTMVAGPSAAWNAANNLVSATDADGNALAMSNLTVTGTVDLKTQGTYTVTYTYTDVAGNKISKEATVTVLTEKETNIEDNTGSSISNDRENPPASITGKGGDDIHQNAKTTMTKKKTETLPQAGNHVNELAIVLGQMILAICVGGILWLKRRVKRV

SEQ ID NO: 650 - protein, 491 aa, Bacillus sp.
MNKIDVKEKFRPQYHFSPESNWMNDPNGMVYYAGEYHLFYQHYPYGTTWGPMHWGHAVSKDLIHWEHLPIALAPDEHGDIFSGSVVVDWHDSTGFFGGAAGLVAIFTHADQYPDSDRPRQRQSLAYSTDRGRTWTKYEENPVLVEESITDFRDPKVFWHEETNKWIMILAAGDHVRFYTSHDLKSWEFSSEFGAQSGSHAGVWECPDIFKLPVDGNKNTNKWVMIVSIGNESAYIEGSRTQYFIGEFDGVSFTNENSDDTVLWLDHGRDNYAGVTWSDISKEDGRRIFIGWMSNWKYANETPTVGWRSAMTLPRELTLKETSDGVRLIQTPVAELEKIRREKRSWNQLILEPEKNVSLDVAGEQLEIIAEFELQSATEFGIKIRKSDSEETIIGYDTVNEFLFVNRINSGVTEFNEYFPCMHGASLKTENNPLKLHIFVDSSSVEIFANNGQVVITDLIFPDPKSTGIELYTTNKKVKLASLVIVQLASIF

SEQ ID NO: 651 - protein, 723 aa, Unknown
  Description of Unknown: Penicillium rubens sequence
MGFCNWATVIANLLVPLGILTFSSGFFPYKPLIPGLATFDETGENVTVPAVFDKVIFMVVDALRRCLHIATLYIRMTRVSYLHRGDLIRSGAALPFTAYASAPTVTMPRLKAITTGSVPSFLDVILNIAESDTTSTLAYQDTWLAQLKAIGGRLVMYGDDTWLKLFPGMFDRADGTTSFFVSDFTEVDHNVTRHVPNELARDDWSALIMHYLGLDHIGHKAGPKSPFMLPKQHEMDSVVTDIYTAMQQQHHLQSTLFVLCGDHGMNEAGNHGGSSAGETSPALLLMSPKFEALGRRESPVEPSGDMQYYQTVEQADIAPTLAGLLGIPIPLNSLGVFIPDFLDMWDNGSHKLRILRQNAEQLLNTLTTTFPGFTFDSDISTSCASEALSAIEEARCAWARVQRLIYDKDEAGDSYSTVGPALLHFLRIAQEVMSRTASNYDVSRLILGLLITGAAGLLVLPATYKECTRHGSSGLFLMLMIVTCGMMMFASSYVEEEQQFWYWICSGWIVYLHIKSQSSAKPVSHKRFGSLLYCIFRPHDTIHETLHIFLMTQSRATNVPLFLIFRIQAGILSSMNLTGIEVTITTLVFQYMTFFAFGGSNAISSVDLASGYNGVGSYSVVLVGVLTFASNWAGPIWWASQSHRLRPKNPAEQNPSALLTFHVAMSLVSVMAACTALRTHLFIWTVFSPKYLYSMAWATANHVAVNLLGEAIFSRSQSRYHYS

SEQ ID NO: 652 - protein, 137 aa, Unknown
  Description of Unknown: Aspergillus niger sequence
  MOD_RES (98)..(98): Any amino acid
  MOD_RES (106)..(106): Any amino acid
MRTWEIDAENDHSCSRLCMLCNRQALFSLLARGYGGEITGRYFSGSAVIDVNNTSHGFGKDGKPPPTPIVAMYTSAYPVAQTLPSGETIRENQQSQTXAYSVDDGXSPWTTYNAANLVIYNLQSHRKTGTKTFLIAT

SEQ ID NO: 653 - protein, 476 aa, Vibrio coralliilyticus
MNDPNGLVFFNGHYHQFYQYYPSDTVWGPMHWGHKISTNLIDWQELEPALYPDESGMCFSGSAIVDWHNTSGLFEAGKPGLLAFYTSFIQPKVRLADGTEMEDPIQQQSLAYSQDGLTWKKYADGAPIISARGNPDFRDPKVIWHEQSQAWVMVVSCGQHIEFYRSTNLLDWRLVSEFGYRHGAHSKGPWECPDLFELPIEGLQEKRWVLVVGIGEGAHCGGAGTQYFIGDFDGETFVNHNHPETVLWLDFGRDYYATQSFSDIPVEDGRRIVSTWMSNHQYSLELPTQEFRSSMAMPRELFLFEGKAGLRVGQRFVKELNQALSLDVQTPEPSDEQAISLYSQQEAMKFSADVALQDTQTLHLNAYQDNPVYFEFVLVEQGVEVRSVRRGQFGTERIDEHFPHDYRVTLPIDNKFQVEVLIDKGSVELLINAGQFSFTNLVYAKETQASVALSVDSGSLALRNVQVSSLAGEKTC

SEQ ID NO: 654 - protein, 515 aa, Arthrobacter sp.
MSTSLDAARPETAPDKDSGFRPAIHFTAKDTWLNDPNGLVFHDGLYHLFFQNNPSGNVWGNMSWGHATSTDLLHWTELPVAIACDEREDIFSGSVVVDHGNTSGFGTAEAPALVAIYTSAFKPGTEYSGTQAQSLAYSTDSGMTWQKYGGNPVLTRGSAHFRDPKVFRYEGGGDAYWVMVAVEAQQQKVVLYRSDDLKSWDFLSEFGPANADEGEWECPDLFPLALDGNPADIRWVLIVNVNPGAVAGGSGGQYFVGQFDGVRFVPDEAALAAPAGLSALPDAEARTEALQHCLWLDWGRDCYASVSFSNVPGGRRIIIGWMSNWDYANELPTSPWRSAMTLPRELRLVTVEGSPRLVQEPVLPELPAGSDLEAGDPPFSLPDAEPGSAQVIDAEMRLEGEGLVEFLLFGSRDGAQGTYLRYDPTTARLTLDRRNSGNTGFHQKFPSVESAPLELEDGLLKLLIVADHCSVEVFAQDGRVVLTDLVFPDVRSLENRLTLTDSRATLLKLAVSKLA

SEQ ID NO: 655 - protein, 505 aa, Arthrobacter sp.
MNSLTTAAGATLAATDQYRPAFHYTAERNWLNDPNGLVYLNGTYHLFYQHNPFGADWGNMSWGHATSRDLLHWDEQPVAIPCDEHEAIFSGSAVFDQHNTSGLGTAANPPLVAIYTSAYSDAAPLPGRQAQSLAYSLDEGRTWTKYHGNPVLDRASADFRDPKVFWYDGGAGSYWVMVAVEAVQRQVVLYKSADLKAWEHLSTFGPANATGGVWECPDLFELPVDGNPEDNRWVLIVNINPGGIAGGSAGQYFVGEFDGVAFHSGSTVTEGLQKDSSRMREYGWLDWGRDYYAAVSFSNVPDGRRIMIGWMNNWDYARETPTGGWRSAMSLPREVSLTRVDGKVMLRQQAIDPLPERETGHVRLGPQPLASGVLDVPAAASVARIDVELEPGAAAGVGLVLRAGDDERTVLRYDTSDGMLRLDRRESGQVAFHETFPSIEAMAVPLQGGRLRLRVYLDRCSVEVFAQDGLATLTDLVFPGEASTGLAIFAEGEGAHLVVLDVVGR

SEQ ID NO: 656 - protein, 689 aa, Unknown
  Description of Unknown: Fusarium oxysporum sequence
MQPKLSLLFPCLLATASATSYTEDYRPQYHFTPAKNWINDPNGLIYHKGKYHMYFQYNPTGDVWGNISWGHAVSDDLMRWKELPVALNAFNSPAGSLNELYYSGSAVSDDALTSGLGDGKRPPLVAVYTSHYTSDMTLPSNKSVRTGQESQSIAFSTDNGLSWTEYPDNPVILEPPSQYADEYLNFRDPFVFWYGPSKHWVMTVSLPKLHKLLIYTSKNLTAWEHVSEFGPVNAVGGQWECPSLFQLPVDGKKSRTKWVMVIGLNPGGPAHAGGSGTQYVVGTFDGTTFTADANNVYDTSAPEDSVVFEDWNETSFAESSWKPTDDFVEQQPSNGQVLTLWQKGDETVGSLSSKKFTVSKKYIAFKIGCCNNPYNPETYGTTKDQETAINLIVDGQVVRSTTGVNGGDIIWASWNVASVIGKTAYIELVDRATGGWGHLDVGEIVFTDKSLPPQANWVDYGPDYYAAATYNGLSNYERVAVAWMNDWAYAVDIPTSPWRSAMSIPRVLTLETVDGRARLIQKPHRNLQTLEGRRMLYKNQWHSTRTGNLTLPVSGKALDITLTFAAGAESKMLGLNVRTDGRTYGTAIGYDFDTNEMFVNRESSGDSSFSASFPGVYYAPLPIRDGKVKLRILLDWSSVEVFGGHGEETITSQIFPSDSSTGVSLFSVGVVKDVKIEVHSVSSAWRGSY

SEQ ID NO: 657 - protein, 866 aa, Arthrobacter sp.
MMTRRTKRGLPALAAAAVVASFTLVVAATAAPAPAHASDPDPATQQYRPYLHYTPVKNWMNDPNGLVYYNGTYHMYYQYNPYGTTWGNMSWGHATSTDLLHWTEQPLAIPQTFNGSGQATEDIFSGSIVVDSQNTSGFGTLQNPPMVAVYTSNFTGNHPTLAGKQAQSLAYSTDSGQTWTKYSGNPVLNRNTTDFRDPKVFWYQGAAGSYWVMSAVEANEHRVLFYKSTDLKSWTYLDDFEPANATGGQWECPDLFPLAVDGNPNNIKWVLVVNINPGSVAGGSGGQYFVGSFDGTTFTSETTDPVDPAPPGTLLAGFNGGSYSGWNVSNDPANPGGPWGTAPPSGTLTGQQAVTGSIGAGLVNGFNGGDVPTGTLESDPFTISKDYINFLAGGGNHPRQAGEQPGNTPPPGYLLFDGFDYPGTLSAAGWQLTGDFEAARNPSTVGGEYAIGKRINTFEGGPNADNNTGTITSPEFYLTNTNIGFLLGGGNRTDGQLQVELLVNGVPVRSTTGSNSGDMNWKNWDVTPYYGQIARIRIVDNATGAWGHLTLDNMVLGSEPAKPRSSETTVNLMVNGQAVRTTTGSNSEHLEWKAWDVSAYKGSEATIRIVDNNRGGWGHILADEFVASDITRPEQHDWLDWGRDYYAAVSFSNAPDGKRIMVGWMNNWDYGQSTPTSTWRGTMALPREVQLTQTAQGPRLTQKVVQEVDALRNTGAAYTASAQDIAPGTSTLPVSGDVVQVDAEFSPGTASAFGLKVLGNSTEATKVGYATSSGRVFIDRTASGNEGFHPAFASVDDVPVQLINGRLRLRLYVDRASVEVFAQDGLATLTDQVFPAAGANTLSLFSEGGTARLESLTVTPLHNAMW

SEQ ID NO: 658 - protein, 487 aa, Unknown
  Description of Unknown: Glutamicibacter arilaitensis sequence
MGENENKASAAMSYRPSYHFSVPDNWKNDPQRPVYLDGEYLYYYLYNEDYILGGSGTSWRLATTTDHVNFTDHGVAISKHESANGDCWSGSIVIDEKNTAGYGEGALIALVTQAPGGVQAQYLWYSTDKGRSFKPGGTKPVLANPGVEAFRDPKVIWHEPSSKWVMLNAEGDRIGLYTSVNLKRWKRTSEFVRTTLGTLECPDLFQFQASDGTKQWVLGTSANGKPHDLPATYAYWVGDFDGKAFTTKEEDPQWLDWGFDFYGAVTYPDHRADGSENPKLRRVIGWNNFWDYPHNAPSMATDGYNGDDMIVREVRMIAGAESYYLASVPVKQLDKLAGPAKSLGSPAVSGGHVLDFSSSAYELECELSWDPANPPENVGFELCRAKTGTRHVATGIYLAGGFAYVNRKPSFHPGDKSETKSPLEVPSGRLKVRILVDRSSVEVFLGDGRIVHSHRVFPLDTDSGIKLFVSGGTATYKNLAVRKLAFV

SEQ ID NO: 659 - protein, 494 aa, Bacteroides sp.
MKIQKMKIPTILGALLVAGTLSAGAQMNSDSLYKEPYRPQYHFSPEKGWIGDPSGFMYYQGKYHMYWWGKVESTDLVHYQQITPYAMTGADDNISYFTGSAVVDKNNTAGFGKGAYVAAYTVFEKDSKKQAQGISFSHDGKTFHYYEGNPVLDLWSTEFRDPTVFWHEPTQKWVMVVAKALEKKIKFYTSPDLKNWTWTSDFGPAGDSEKSWECPDLFQLSVDGDSDKKKWVMVVSVNWAQEQYFIGDFDGTSFKLMDNHPAEPLYVDKGLDFYASRTFQDFDGTLDSKISMGWVATWDYAPVAPSKYGKGFWSIPRNLELKTYKEGVRLVQKPVEQLQTLRHKPASVKRALSVGTQRLPGFVPDENVYELDASFSTDVSNTFGLNLCVGEGRKVVVSYDTDSHNLVIDRTHCSDVQIPKFSRMAYARVEPVDNKIHLHIFVDKSSIEIFANDGKDVFTLLTYPGEAQTGIELFAQKKGTKMELDAWMLKSIWR

SEQ ID NO: 660 - protein, 604 aa, Bacteroides sp.
MIHLKDFWRTIRRTLTVFILGTTVAVFTCQAINPPFVIKHLGDGQSIVQIDEQKKFLLLPVEEASPEAKLYMIADNDVVRSMNVRLAVNKVDYFVPVDLTGFDNKHLSFNFQLIPDSALCWEEMKLSDEFDVSNREKFRPVYHFSPAYGWMNDPNGMFYKDGVYHLFYQHNPYGSMWGNMHWGHATSTDLVTWEHHGDAISPDALGTIFSGSCVVDKDNTAGFGAGAVIAFYTSASDRQVQSMAYSLDNGKTFKKYARNPILTSTQRDFRDPKVIWHEDTKKWIMVLAVGQEMEIYSSADLKNWTLESKFGEGQGAHGGVWECPDLLELPVEGTELKKWVLVCNLNPGGPFGGSATQYFVGTFDGKKFVNESPAVTKWMDWGKDHYATVTWSNAPAGRAIALAWMSNWQYANDVPTRQYRSANSVPRDLSLYTSEGETYVKVTPSPELLKLRDKGSKKRAFKVDRTYNLDKLLNDNSGTYEIEMTIKNKDADVIGFQLFNSKGEEVEMYYNLAEKTFTMDRTKSGEVTFSKDFPAVTVAPVEGGNEMKLRLFVDKSSIEAFGNDGRFAMTNLVFPSEPYNRISFYAKGGSCNVTSFTVYKLGLK

SEQ ID NO: 661 - protein, 541 aa, Sphingobium yanoikuyae
MGLCLLWRDDAAPVHLDLEGDARNQRCRARRHGPWECAGMIRTLFLMTATALMVPAATQAQRADPRPTYHFAPKRNWMNDPNGLVYFEGEYHLFYQYNPHGDRWGHMSWGHAVSRDLVTWEELPVAIPETADVMAFSGSAVIDWKNSSGLGRDGKPPMIAVYTGHNPKAKLQSQYLAYSNDRGRTWTVHGEVLSVGSPEFRDPKIFWHEPTKSWVMVAVMATENRAVIFTSPNLRQWTFASSFGPAGGRGRNWECPDLNLLPVEGGKPGEQRWVLSVNLGDQAVGGGSGGQYFVGDFDGRRFTPVEGWGGEPVWTDYGADFYAAVAWNDLPKDDPRRIWIGWANDWRYAEAIPTYPARGIMTVPRSISLRKTAEGYRLTQRPVQELEQLRGGKQAVRQLSLGEEPVPLPVEGGAIDLQANLSLGQSEQVAITLTDGEGYQMVIGVNPTVNEVFIDRSRSGPHFHDGFANRHVAPVDLSKGRVSLRLLVDESIVELFINDGEQTITDRFFRGSGTLRWSASARGAPAIMDITAWPIRPEVSR

SEQ ID NO: 662 - protein, 538 aa, Sphingobium yanoikuyae
MAITPFYSRRQTLEMLAAFPMLSSCGSEAEPAIGAMPVSSGTPDSTGLLTATPISERPRYHIAAPAGGWINDPQRPVRMGDRWTIWALFNPTYPTDGTEWRRWTSTDLVTWQDQGISIPRRTTSFGDIWTGSAVVDVTNTAGFGPGALIALVTMPADNAAGQNQSCALWYSLDEGASFTFHDIVLPNFPGNRQFRDPTVFWHETSGNWIMTLSEEGKIGIYTSPDLKHWTYSSGFLSTVVGGVMECSHLFKLHLYNPDGTTSADKWVLLVGGDGTASGFTGGTWYWVGEFDGTTFTASAPDGQWLDGGADFYAAVIWNDPQAADPIACAYSMGWMNNWAYANQLPATHDYRGQLSIVRELRLRLINNAPRLSSTPLPAQNKIFALTAQGSDQTIADGYDYIWPDNARMVAGRIDLTLNRIGSAWPSIVWLSVRGGSGYSTQICFELGNNRAIIRRVTSGPEAPDSEAWRLDRSLPCDFSEGVVDVSLFIDISSVELFVNNGEATLSQLINARIADTSLNLTTVHGIVLVSKVSISSYI

SEQ ID NO: 663 - protein, 1064 aa, Unknown
  Description of Unknown: Lactiplantibacillus plantarum sequence
MKTNEKQHYKMYKSKSMWVFACLSTCLIVSFFNGGQNVSAATSASSSQISQNNTQTSDVTTDESVTQSLSVNDVPTVASSKQVDLPSSSDSEASSSNTASNTASNTASNTASNTASNTASNTASNTASNTASNTASNTASNTVSNTASNTASNTASNTASNTVSQTDDNKNQVASNSTNNTDVTKPVTTSDSDKAIVNSNTTLPTSDEQAKSSVGQSQTDQSTSSTTIATKAITTKAITTIAIDNSAKATTPDISQNDQYDEQYRNQFHYSSNENWINDPNGLFYDSSTGLYNLYYQYNPKGNQWGNMSWGHAVSKDLINWTQEDVAIPWLENQGWEDFTYTNTTGNLKDYGTVRYIGDPTGDWGTTPNSKAIFSGSIVVDANNVSGLGKGTILAFYTADYEIATRKNDGAEGGLGTWIGVNEIQEQHLAYSLDGGKTFIQYSKDGNAANPQAIIPTSMNQGGDAANFRDPSVVYDAVNKQYYLTVVSGQQALIYKSSNLLDWTYASKIERENDVGNGVWECPSLIPIKVAGTNDTKWVFCVSVQQGAHATGSGMQYYVGNMTADGTWMPESSKTLQDPMTMDSGEDFYAGIPFSNMPDGRTVMLAWQSNWSYTGEANTTPWYGNMTLPRELNLEKSPDTTDGYLLANTVVKEIANNEEANVIDQKDSNFSISSNDQKVQYDGKQYKISATFSWDESNKPSSVGFKLRVSDDKKYDMLVGYDLTTGLFFVQRLSTGEPNMGAPRDKMNATVNADGSITITVYVDETSIEAFANNGEKSITQNFFMRPENIGDQATNGVYVYSDNGTTNISNLTINPIASIWNSVGKLTEKFVDESGNSIADNVVSSGNIGAPYSTTQKDIAGYTFKEVQGTPTGSFTAQDQTVTYVYTKNPVAGGNVTAKYVDESGNSIADNVVSSGNIGAPYSTTQKDIAGYTFKEVQGTPTGSFTAQDQTVTYVYTKNPVAGGNGTGDTGSTQSGNPSATGKGQENPSFDQLDNPSQLNNSTKNGIVNTSTSTESQSNNTSRLPRTGEDNNGNQTISFAGILLVILGNLLGLIGIKKHRSFL

SEQ ID NO: 664 - protein, 480 aa, Plantibacter sp.
MHDEQHALPRPRFHLTPERNWMNDPNGLVFHRGRWHAFFQYNPEGGDWGNMSWGHASSVDLQHWEEHPVALRYTTEEQVYSGSVVAAGPGGRLTAYYTSVSTDGRQAQSRATSDDDGLTWQRDPENPILDRGSHAFRDPKIIRYEDAAGFRWIMLTVEAVERQVLVYSSTDLRTWEHVSTVGPFGPTGVVWECPDLIQLAVDGRPDELRWVLLLSTNPIGDAQDPDGSSMSYLVGDFDGSVFTPERAELQRLDHGRDFYAAVGFDRAPDGEAVILGWMGNWRYAADLPASPWRGAMSLPRRLSLTTVDGQPRLVQEPPAFVRERLAAIDPTTVALSSDAVDLALDGDGVVELRWDPSITGELRLRLTADTDGAVLIVHDPAAASLSVARSGGAMETVHPDFASTSIVPLAGDRPARLVLSLDGPLLELFVNGGLATVSDLVLLGSGRPTLTLASERASPVSVAVAVLDRAPATDQVHALA

SEQ ID NO: 665 - protein, 1188 aa, Streptomyces sp.
MSVSRRTLLLAGGTAATLLPLAGVLPAAQAATPSAAGAPPVPIPDPLPVTGTWTRTSDGGQKVTAGTRERALALSEQQLASKGTYAARITPQSASAVGALLFRAALDGSTGYVAALDPGRARIRLYDLASGDTLATAPLPGTQAARPYDLEVAVDGPELTVSVDGRRLLHAEDHRHDTGSVGLLAQGGTVTFGPPSVSAITTNLTGWTTSGGTWTATPLGWRANPSQASITRAVTTTRAHDTALRADLLLHDTSAVAELLVRTDEAATHGYGVQVDPGHSRLRLYRIDGNVTLGTYTTTIKADTVYRLRVEAEGTELRVHWQTNFLSPDGYSPVITAQDSTHTTGRLAVTASAAAVSFENIAAADLATSVQGWTARSGTWTPDLRGIRGENGLRTAPFTDGDLVARADITPAGTSTSAGLVLRASANGSGGYEARLEAGRNAVVLLDRSSGARLASTSGPVRPIASGGTYRVEARATGRTIEVYVDGVQALKTRVLRTTGATVGTTAAHGTSYFQNVEVRSTAGYFTEPYRPTYHYSQLTGSTSDPNGLVYYDGEYHLFHQDQGRWAHAVSTDLVHWQALPIALPWNEYGNCWSGSAVVDADDTSGLFDGGSGLIAYYTSYHPDKPGGNASVRIAYSKDKGRSWQWHGGSAPAVQNPGGPDAGWTFRDPKVIHDEKHDQWLMVVSGGDHIRFFTSTDLLTWTHVSSFGYGDWATPGVWECPDFFPLPVDGDETRVKWVLTLSTGAVRATNGSAAQYFTGDWNGTSFSPDQSAGTTLRADSGRDYYAAMSYYGLPEGRRVWLGWMSNWDYPFSAPTGAWNGQLSIPRELTLTDTADGVRLAQRPIPELTALRTSTTTRKDLSVGPDSENPLAGVTGIAYEIEAEVTLGTATEIGLRLRADEDQHTTVGYDAEANQLFVDRSEAGLSDFTQYFAGRTTAPMEPTDGRVTLRLYVDSSSVEAFGADGRAAVTSLIFPSPSADGMAFYARGGTAHIESLKVHRLEGTHRLVDLVKPLVAAPVGGAFRSDLGVLTITPAGHWSTDSAGRAGTFDKDSNAMSARTATDVDFTTLIRLGGPAPDTGGALSLLWRASFDGTNAYHLNIDPDLRVIRLVAKANGYFDDGAALARVPALVRRGTTYPVRILAQGDRIQVFLNGEQIINVTDTTYTNGHVGLNVFGGRAAYQDTYVKEL

SEQ ID NO: 666 - protein, 726 aa, Bacteroides uniformis
MKERILILLLLATVCSMQAQNIHMALRPDDLLIDNFEGDTFGNWILEGNAFGNSPVSMERLSIWGDNRFEGNRMASSFVNGDAGTGVLKSPLFRIERRYVNFLIGGGVDYQREYVALWIDGKEVKRSTGYNRRVMEYESWDVAEYMGKSARIVLVDQSKEGWGFINADCFYQSDTKLEKEIFAKRMLVTHRYLNIPVKMGAVIEQMDIWIGDKMVRNMEVELGGDEPDYWVTLEVKDWIGQELRIEASKSPNVEQALNQCFCSETPKEENLFYKEPLRPKVHFTSRRGWLNDPNGLVWHEGEWHLFYQHNPYGCIWGNMTWGHAVSRDLAHWTELGDVLHPDSLGPIFSGSVVVDKKNTLGCQQNGDTVLVAVYTSAGGFGYHTRHLQHSQSIGYSLDKGRNWVTFSGNPVLPTLVRYNRDPKVTWHTPTGRWIMVLYLDKQEYAIFSSPNLMDWTETDRFKLEGADECPDFFEMSVTNEPTVRKWVFTGANSTYLVGSFDGYRFRPETKPVKMDSGTNYYAVQTYSNAPDDRRIQIAWMNGSNFPDMPFNQQMSFPRELTLHRVDKGYVLKSMPVNELALLYGRKYIWKSLVVEEKNCFTTKLNTPAFYLKTGFAVDSVDAQILAFDINGLNLIYDSVKQILTVEKENGETLKQMVLKPNEGRIELDILSDIASVEIFVNQGALSAAFYHLIEKNTPSVTISVEGGQTKLKQLTIHELNSMYVPQ

SEQ ID NO: 667 - protein, 524 aa, Streptomyces sp.
MRGLTRRKLFRAGALGAVGAALPSATARAVPGERGTAPVNRAREAASYRAEYHFTVPDQWKNDPQRPVWIDGEYLYYYLYNADYLTGGTTSGTAWRLATSTDLVRFHDQGVAVPKDTTPNGDVWSGCAVVDTDDTAGFGAGAVVVLATMEPDETAHSQAQYLHYSTDGGRTFQPHGTDPVLPNPGVKDFRDPKVIRDEERGRWVMALTENTKVGIYHSDDLKQWRYAGGFVKEGIGVLECPDLFTLRTSDGDTRWVLAVSANGKEAGLPNTYAYWTGDFDGTTFTPDADEPQWLDHGFDWYGAVTWEKRGADGSVDPGVRYAIAWMNNWDYPDTTPTIDADGFNGTDSVVREVTLHRDGSGAYFLASRRVAALDRYVSRTVDLGDLAVDGPLVLEYTGTAYELTTEITWDELAGAGVQLRRSADGSRHIDAGVHEDYAFVNRRGSANPDTSGRWQESRSPFDPAAGKVRLRVLVDRTTVEVFFDDGRHTHSMEAFPYLVDTGLALFTTGGPAVFRSTVIREFTL

SEQ ID NO: 668 - protein, 580 aa, Actinomyces sp.
MTDESHGAHPSDPHHPTHPAESAGSPSSSGPEPTQPEVCPPAPAGTAPESPSPEATDPQHPQPRRTGLRRRTLILGAAGAGALIVGGAILVRCTTGHWSSPTPTATDSPASAAYRPAYHYSPATGNLADPNGLVLYEGEYHLFHQQDGTWGHAISSDMVHWKRQGTALEHDAQGLAMSGSCVVDGANTSGLVAGGGLVAVYTSTEGGEAQSLAYSTDRGRSWQRFSGNPVIPNDGRKDFRDPKVFWHEDSKAWIMIVSAGDHVSLFRSTDLKAWSHASDFGQGIGSHAAVWECPDLFPLTDSSDGRTRWVMTLSVGANEETAGSTAQYFIGDFDGSVFFPEDRDTRFTDVGQDFYAAQSFEHVEGRRVWMAWLGNWNYPYSLPTGDWRGEMSIPRELSLTTVGGKRTLVQKPVPELDALRGRATDLSGRQATDTVTALGTGRTVEINLTLDVSHASEAWLGLARGTVDGKTQEVRVGVDISAGTLYLDRTDGGLTQVDGKDEGTTTDFALRRQTQYRPTGSTVRLHLYLDRSSLEVFVDDGATVGSLLVFTAPSCQEIVLGAKGTATITSGSLTPLAAAL

SEQ ID NO: 669 - protein, 548 aa, Bacteroides fragilis
MHLTTKLFFTATLLAGNLFASFAGDVTLKITKKYINLPVSHQVDRKKMTFEVKGTPERNFVIRLADEKPDYWVFCDVSSWKGKTLRISYEGESAGLEKIYQDDVIAGQDSLYAEKNRPQFHFTTRRGWINDPNGLVFYEGEYHLFYQHNPYEREWENMHWGHAVSRDLVHWEELPDALHPDELGTIFSGSAVIDYDNTAGFNKKNEPALVAAYTVDNPEKQRQCIAYSFDKGRTFTKYEGNPVIDSKAKWNSKDTRDPKVFWYAPGKHWVMVLNERDGHSIYNSADLKNWEYKSHVTGFWECPELFELPVDGDKNHTKWVMYGASGTYMLGSFDGQTFTPEAGKYYYYTGSMYAAQTYSNIPASDGRRIQIGWGRISHDGMPFNGMMLLPNELTLRTTSKGVRLFSVPVRETEQLFQPVGNWTSLSSDAANQRLQAFSDKDGLRIRTTIKLSHATSAGLNLYGQPLVDYDMNSNLINGVFYSPDDRTSMELTADIYIDRTSIEVFIDGGAYSYSMKRSPREGNREGLHFWGNNIEVKNLEVFSVKSIW

SEQ ID NO: 670 - protein, 503 aa, Leuconostoc mesenteroides
MQRHRVRKVLSIIMAGIVLFSIGWLICLKNNSKNMTQQQLPQKWHLNGLSKNGLSNDTQTILKNGQKYELFYLVDTGKGLEANQQRTRWARSVSSDLTTFKVADNTDIKPISQQESVATGSIVKDTDNLSGHGKNSLLAYATKYINGNQWTYMWYSTNQGENWHVAHNGKPVAKPYKEGKDFRDPHVIYDSDAKQFVMTVAEADDNNHMKIGFYISKNGTTWQYTDSFYSPRDLGTLEVPEIHQIYQKNNNQKQWILFFGANGFADDFQKSTGSYYVVGQLKNGQFEAETDPERVDFGTDYYAAHNYQENNEQLLGFGWMGNWDYINRVSDDIKYKGNYSAFRKMFLSSDNKLKTSKIITNGLFDTKKKTALVRTHSKSHIKTNKAAYKISTVVNGNQKLTIRAGNGDSNVSFHFNNFDKKLTVHRQSNYVTNDAYNKDYNINLWGDWSEKVDFYVDQYSIEVFWPKTGQVATFAKYSNDSGDNIVFDNLDNKSSSLVVQEMK

SEQ ID NO: 671 - protein, 573 aa, Streptococcus salivarius
MESKYSPLILALVFLILFFVFIIKNENANNPSQKTNKVSVSQTFHLASHKGWSNDLQTIVWNQEKNYYDIYFLHSVDGATDPFGPNGQDWTHTTTKDFITYSKQETAIPAKGGDPKEGWHSAWTGSVVTDSQGISGIQNEEPVAYFTGLMDDGSQAIYASASNDKGASFTNSLKDGKPLLTKEQSYNGKDFRDPYVFHFKDKLLMYVAEGNALGVYQSQDGINWTKEDSKGDSKILPETFFKGRNWQDNAPIECPVLKTMTTTDGQDKQVLFFGAKDTASGETTGTYYTVGHLDGNGLFIADTETKRLDQGSDYYGANFTGSNRIEESNHNLISLGWVGNWNYFTSGIHSDQEAKSDFLKTIGFYTTPRQLQLDKNGIIQSAPLYKNEQLTLKNQNGNISSQRPLTSDNRKPWIDKSHNQNANGLLDLAEKNSAGYYQLHFSNIKKEGGYIYIDIWQGSDYVKIAYQITSGTYQVSTYAAELNNSMDGSQTASSYYYDGLLGNGQGYKADSLYKENDNITITLITDNRSLEIFFPNGQTYTLARFNTSGKQDVKVFSTQEDLLLNLKIYDVHS

SEQ ID NO: 672 - protein, 511 aa, Blautia wexlerae
MILNVEKPYIWLPVSKNAPERKLHFYIEEKKIQEIDIHLGKTDCEFYGCWDASAFLGKDLQIEGADKELLEGIFCYGKPYDNVYPYRPKLHAAPATGWHNDPNGMVYADGFYHLYYQWNPYGSMWGNMQWGHVKSKDLYHWEQEGLAIAPDETGTVYSGCGIQDKDNLTGYGEGALLYFYTAAGGRNQWSVDAGNLFTQRLAYSTDGGKTLQRSEKFCMPHIVNENRDPKVFYHKESKAFIMVLYLDGYDFAVYRSTDLLNWEETQRISEPGMWECPDLLELEVKNVSGEKRWVFWSADGYYMTGEFDGYKFKPDGCRKSGYSSVLPYAAQTFSGVDDRVISMAWLRMKNDRGNYRGLMSIPTELSLEKEGNDYKICFAPAKELENLEAGWYDSLKSTISPEGQACKIVLTPEAGTKGEWRLTIGSLRLTVDFYSNILSIEDTETHVYYMRERISTEQEISFIFDQEVIEVFAENGKVYGAAETEENILGMDWEVFRTEDLKVSEKMCLYK

SEQ ID NO: 673 - protein, 493 aa, Halomonas meridiana
MTLADFEPQRPVVHFAPPMGWMNDPNGLVFFEGEYHLFYQFHPFSTVWGPMHWGHAVSRDLCHWQHLPIALEPNEEGACFSGSAVVDEHDDTGLFDGQPGLLAFYTCHRVLSDDPEDYQQSQCLAYSRDKGRTWQRYEGNPVLPPPGFKDFRDPKVVWHGPSQRWVMALACGQEIHFYTSHNLLEWQFASAFGEGEGAHTQHPWECPDLFELPVDGAGPDEPATRWVLVVGIGATPDNPFGSFTQYFIGEFDGQRFTNDNASDAVLMMDEGRDFYAVQSWSNTPGRQLALAWLNNWQYANHAPETGWRGTMSLPRELTLRATSRGVRLHQHFAREAAQALSAPRRLSPRSLQTAGEHCIALPDGEAIHGQLTLVLTAGTKLALSLQQGYQQRLWLTAGESTTSLHYERQGSNGQAAFDEHFACDHSAGSVDGLTVMVRWWCDHGTLEMLVEGATEQRYITQVSFVDHRRQPVTLEVVRGRVDVAEGVTQSVAE

SEQ ID NO: 674 - protein, 524 aa, Leuconostoc mesenteroides
MTFTRLLKVAGAMFSLFFISVSSVMAGTVTSNEYQQYYHHNIEQGVMNDIQSIWQDASGYYHIYYLADLNYKHDDDGTEWYHVKTKDFVHYEKLGIAIPKFQNKWEAVATGSIINNTNHFFADLPKKAIIAYFTSYTPTGQKQYVAYSIDNGVTYQPYSDGAIMSATSEKTHCRDPYVFFNKETKKVTMYLAEDDKIGVYTSGDGIHFDYVGATLLNSGALNGKDLGLIECPNLKTMCDATTGTTKSVLFFGANGYNYGQTSGSYYMVGHLDNTGVFVAEQQPKRVDDGSDYYASNYFQTSDNMNILSIGWLGNWEYSCKKIVDANGEQSYKLGSLSLAHQLNLTQVNGEYTMVSSLIKPYDRLTQTIKDTISTSQLAKNNKGYYQLLNTQRWISQSFYLQMKNKKKGTVCGEIHLSFKQKDATVDLRYNADTGYYTVTRQTKNIADSGANTEYNRTFIEQSGVINPDVFKLHVYTDKTSVEIEFENSGRTYSLLKYSTEDDLLFNVETNSENDLFYSMSNVDN

SEQ ID NO: 675 - protein, 670 aa, Pseudoalteromonas sp.
MRTVNLVLISSFLAACSMTNQTEKTAPMGEDKPSKEAFRPAFHFTPEKHWMNDPNGMVYYQGEYHLFYQHNPDSSVWGPMHWGHAISKDMVNWQHQEIKLFPDEHGTIFSGSAVVDWQNSSGFGSKENPPLVAIFTYHDDKKAAQGAIDFQTQGIAYSTDKGRTWKKYANNPVLKNPGIRDFRDPKVSWHEDTQQWVMVLAQDDHIGFYSSKDLKTWQFESNFGADWGSHAGVWECPDLIRVRIEGTDEYKYVLLVSINPGAPNGGSGTQYFIGDFDGEKFVLDSDYQKMLTGTPAAFPEGLDFSNFKNGLKNWQVSGDAFHIVNDQPANTIASSFKDSDKATGTLTSKSFAIDHDFINFKIAGGKHHNSTAIQLLVNGEIVKTASGNNTGTMTERSWNVSQLKGQQAYIKVVDNERGDWGHIKIADIVFSDKAANEKYEPSIWLDYGTDNYAGVTFSDVQDGRHLFMGWMSNWQYANQVPTEVWRSAMTIPRELKLLQTPAGVRLASKPIKELDSLLSKPQQKATLTGANSYQLDELFTVEPGQFKVSFSVANAEQVIDIVLSSATDEYTKLQLNPAQGQLILDRRQSGLKDFEDGFASLQTAPLQKGLEYYDVDIWVDKASIEVFVNKGVSSMTSIVFPTSPYNRIRVSADQPLSLSDVKLNNIAIEK

SEQ ID NO: 676 - protein, 481 aa, Pseudoclavibacter sp.
MTSTAPTTFRPAFHMSVPRGWKNDPQRPIRVGDEYLSYYLANDDYVEGGIGTSWRLATTRDHVRFSDQGTAIPKFANGNGDCWSGSVVVDAHNTAGYGRDAVVGLVTQAPAGVQAVYLWVSTDGGRTFTPGAPDPVLANPGVVDFRDPKVVWDDDRARWCMLHAEGDTIGFYVSADLHGWRRVGEHRIEGIGLLECPDLFRMRASDGTRHWVLGTSANGKERGLPATYAYWVGEFDGSAFTCDEREALWLDHGFDFYGAVTYDAHDAGGDVDESLRRAIGWANFWDYPHNAPSMVTDGYNGDDMIVRELRLHRRGSGYALSAQPPAALLEHATRRHSLGTVAVAGSSDLEVRAVAYELRCELRWDPSSPPTGAGLELRRASGGARRIGVGLSFADASISVDRGETWSPSGGATTTSIDASTGSLHLRILVDRSSIEVFVGEGFEVHSHRVFPLPADDGIRLLAAGGQMTFADLEIIELEVR

SEQ ID NO: 677 - protein, 473 aa, Unknown
  Description of Unknown: Paenarthrobacter nitroguajacolicus sequence
MRPVYHFSVADNWKNDPQRPIYLDGEYHYYYLYNADYISGGGGTSWRRATTTDHVAFRDRGVAIPKFSNGNGDCWSGCLVVDEGNTAGYGAGAVVALVTQAPEGRQAQYLWYSTDRGRSFKPGGEAPVLPNPGVHDFRDPKVVRDEDRGRWFMVNAEGQKLGFYTSPDLRSWKRVGEFVRTDLGLLECPDIFRMTADDGTSHWVLGTSANGKGRGLPATYAYWTGAFDGSSFTPDHDEPEWLDYGFDFYGAVTYPHHVVSGAEDPTLRRAIGWANFWDYPHNTPTLATDGYNGDDMIVRDVRLKRGNGTYYLVSAPTSALGDHVKRTHLLGDVSVAGTHDLKVRSSAYDLSCEVVWDPASPPANLGLEVCRAPGGGRHVAAGAFLPGPFTYVNRRPTINPTAGETQTPMDPSAGRLTIRILVDRTSVEMFIGDGRVVHSHRVFPLEGDDGIRLYAHEGAATFRDLTIRELKVV

SEQ ID NO: 678 - protein, 895 aa, Klebsiella sp.
MKYYFFQKNRLTLITLASLALLAGCDNSDDYSENHPSHQQSSYLEKYRPQLQFTAAKNWQNDPNGMVYFDGEYHLFYQYNPNGNSWGDLSWGHAVSRDLVHWEELPVALPVEKDADGNVTQMYFSGSAVVDFNNSSGFGKADRPAMVAMYTSYYPTDMTLDNGKTIAAGTQAQSIAYSLDKGRTWTQYEDNPVIPLPPAGYESQFKEFRDPKIFWYAPENKWIMVAVIATQHKAVFYSSTDLRDWNFMSEFGPANAVGGVWECPDLFELPVDGDSNNKKWVMVININPGGPAGGSGNQYFIGHFDGERFTPDDDSVFNGEAPVGSLIADFEESESESGWTATKDLQGAYLSKGDRAGQSGVSQYLGEQLVNTFVNGDASVGSITSPAFKITDRYINLLVGGGNHPRNPDAVEDSVPPSGDLLFAGADFEGEDGATYDDIGWTSSGDFVGQVVASGTIATQQQVSGFMGRKLVNSYFGELVGKGGDAVTGTLTSANFTINKPYINFLVGGGNHPYGAEGAAAVVLLVDDKVVRSATGSDSESLNWTHWDVQEYQGKPARIMIVDENTGGYGHILADQFMAGDEPAQPISTETTVNLLVDGKVVYSATGDNSETLGWRSWNVAALKGEMAQIRIVDNSTAGFGHVLVDHIIQSDRPKQIANWGDFGSDFYAAVTWNGAPDGKRYWLGWMSNWNYAGSIPTTPWRGGQTLVRELSLQTIDNKIRLVQTPVDALKSLRNNALFTLSEEKVVAPGDTLLADSQVQGQVYEIEAELQPGSASEAGFKVRTGSHGEETLVGYDAAAGEVFIDRTKSGTNAFNSGFAARHSAPLPLSDNASVALRIIVDTSSVTVFSGKGEVVLTDQIFPEPTSQGIEIYSKGGDINVKSLTIWPLKSIWEDK

SEQ ID NO: 679 - protein, 492 aa, Flavobacterium sp.
MYRPNFHFTPKKGWMNDPNGMFYANGYYHLFFQYYPDGNKWGPMHWGHAISKDLVKWEEQPIAIYPDNDKYIFSGSAVVDTHNTSGLGTGKTAPIVAIYTLHDMTKEKENKIDVEQQDIAYSNDNGFTWQKFKEGNPVVKNPGIRDFRDPKATWDETHKQWILVLAAQDRSQFYKSKDLKNWEYLSDFGKNIGAHGGVWECPDFFQIKVKGTNETKWVLIQSLNPGGANGGSGTQYFIGDFDGTTFTLDSNFAKRVEQEKAVWIDYGKDNYAGVTWNNVPSTDGRRLFIGWMSNWEYAQDVPTFAWRSSTTIAREIQLIKKGNDYSLISNPVKEINKYVSKTIKEKSLKGKGKLSILGAGKIDLTQAIVNFNLKNLKQDTYTFTLSNAIGESLTFGINNSEHYLFTDRSKAGKNDFSEKFASTTTKAILDGNQKEGVFKIILDKTSIEIFYNNGEKVITEIFFTNQPFTSLSVSSNEGVELSNLVINQLNIN

SEQ ID NO: 680 - protein, 516 aa, Streptomyces sp.
MRGLSRRALFAGSAAGAGAALLPTAGPAAAKPRAAASACARYRAAYHFTVPDQWKNDPQRPLWIDGEYHYYYLYNPDYFAGGTTAGTAWRLATSPDLVRFTDRGIAVPKDTTPNGDVWSGSAVVDTSGTAGFGAGAVIVLATMEPAGGAQAQYLYYSTDGARSFRPHGTAPVLPNPGVRDFRDPKVIRDEERGRWVMALAENDKVGFYHSADLKSWTYAGGFVKDGIGVLECPDLFRITAGDGTAKWVLGVSANAKGAGLPNTYAYWTGAFDGSAFVADAPDPQWLDHGWDWYGAVTFEKRDADGTLDERARYAVGWLNNWDYAGTTPTIDTDGFNGTDSIVREVTLEHTATGAHHLVSRPIAALDRYVSRTVRLGDVEVEGTRVLDYRGTAYEVSCEITWDRLAGAGLQLRRSNDGGRHVDAGVYGDYAFLNRRSTVNPDASGRWQESRSPFDPSARRVRLRVLVDRTSVELFVDDGRYVHTSEAFPYLIDDRLALFTVDGRAVFRDTVIREFTV

SEQ ID NO: 681 - protein, 505 aa, Unknown
  Description of Unknown: Pseudarthrobacter oxydans sequence
MDTLTPASPAATTDSYRPALHYTAKDTWLNDPNGLIFHGGVYHLYYQNNPLGNVWGNMSWGHATSTDLLTWTEHPVAIACDENEDIFSGSIVHDRDNTSGFGTPSVAPLVAIYTSAFKPGSTHEGVQAQSLAYSLDGGYTWIKHTGNPVLSRASAEFRDPKVIWYDGGADSYWVMVAVEAKDFQVVLYKSRDLKTWELLSTFGPANATGGVWECPDLFPLPVDGNPDNLKWVLTVNLNPGGPNNGSAGQYFIGDFDGTTFTSASTVTEGTLEPARLGEYQWLDWGRDYYAAVSFSDAPDNRRLMIGWMNNWEYANHIPTAPWRSPMSLAREVSLQANKGKLHLVQQPAGDWHALAGTEPFSLSGTTIQDGVQVLAGAAGTVQRIDVSFTPGSAEEFGLILRGDGARGTRVGLRPGQDTLLVDRRESGRTDFHASFSSIDTAPILAKQGTYDLTIYVDRCSVEVFAQDGQVTMTELIFPAETSTDLAVYAVGGAATINSLQVTQLA

SEQ ID NO: 682 - protein, 455 aa, Unknown
  Description of Unknown: Fusicatenibacter saccharivorans sequence
MMKKRDYRPKIHFSPEEGWMNDPNGMVYVDGVYHFFYQKYPYDTSWGPMHWGHATSRDLIHWEHQPIALYPDELGFIFSGSAVYDTQNSSEYGTNENPPIIAIYTSHHKDGLEQQSIAYSNDKGRHFEKSYLNPVIKNPGISDFRDPKAFWNPVRRCWSLVLAAQDRVFFYASQDMKNWEKTGEFGPEGNHVKGVWECPDLFPIEYKGKNVWVLVVSMTKASEDDHCKMQYFLGDFDGEKFLCTYPSDEPRWLDEGFDNYAAVTFQNAKDVLLMGWGMNWQYAAQTPTEEYCGQATLARKLSLTEVDGALTLVAAPAGLEKFRHSSYPIENHTTIRTETFGLKVSGKGDAKICLKNSVGQKLKIYVTDTKITVDRTMAGYKEFSEHFMTEKYSISTAARKKDGAWNLELVFDVSILELFAEDGVDAISTVVYPETPYDRVSWKGDLSVELYEIDA

SEQ ID NO: 683 - protein, 465 aa, Unknown
  Description of Unknown: Fusicatenibacter saccharivorans sequence
MSKQGKRDFRPNIHFTPEKNWNNDPNGLIYIDGIWHLYYQYNPNDVVWGPMHWGHAVSKDLIHWEHLPIALYPDEIGTMYSGSMAYDENNTSGFAKYGEKPMVAVYTAHNMETGLEQQCIAYSLDQGKHFEKYYGNPVIKNPGTPDFRDPRVFWNDKKDCWSLVLASGDHAEFYASQDLKNWKKTGEFGVGVNKVPTVWECTDLIRVKTGNEFDGFKWILIVSMIHPGTEGRANIQYFVGDFDGDTFQCTEITDEPLWIDFGFDNYAGVTYGNYDRPVYLGWGVNPLYANFVPTGEYSGLMTLPRELSLCETEEGYRLKTKPFGIDEYRAGAFPIGNQKPLLTESFGLLVQGNFGRIALKNSRGEEVVIEVTVDSITVDRSKSGDLSYFDDVDPKIFKKEDLLVSTTKRYMRGNVNMEIIFDVSYLEIYADGGLETASVCVYPDAPYQVVSTDGDLEVKMYTIKK

SEQ ID NO: 684 - protein, 554 aa, Burkholderia pseudomallei
MHSMSNPRLRFSSVVYGLIALAACASFAAHAAGARCAASPAKSADGTPQWRPALHYTPRRNWMNDPNGLVYENGVYHLFYQYNPHGNFWGDMSWGHATSRDLVHWDEQPVAMPANAREDIFSGSIVADARNTSGLGTPNAPPLVALYTSVYKAGSGHEPGTQAQSLAYSIDHGKTWRPYAHNPVLTLAPESRHFRDPNVTWYAPGGYWMMTAVVADAPVVKLYRSSDLIRWDFLSDFTLPDVPHRGALWEMPELLPMPLDGDAARMKWVMIVNVNPWSIAGGSGAMYFIGEFDGRTFTPDRTAPANADPAQYSWLDHGADYYAAGTFANAPGEGPVAIAWMSNWDYAERIPTTPWKGAMALPRELALKTIDGRPRVTVAPARAFDAFARTRPAVRIGSLAVASATRELGADARGTVQRIAVTIEPRSARRAGLIVRRSANGRVGTRIVYDSSAHTLSVDRSASGETNFSNAFSQRHIVALPLVNGKLRLDVIVDRDSVEVFDGDGRTVITDLVFPSPADNRLAVFAEGGDATFGDVVVTNLDETAGERRGCPTS

SEQ ID NO: 685 - protein, 461 aa, Unknown
  Description of Unknown: unclassified Rathayibacter sequence
MTITTTTDAWRPSAHFTARSTWLNDPNGLLFHNGTYHLFFQNNPTGSTWGNMSWGHATSTDLVSWSEQPVAIPVLDGEMAFSGSAVADVRNTAGFAGPGETALVAVYTAARDALPDGTGASQAQALAYSVDDGATWTRYAGNPVLDIGSAEFRDPKVFWFGGDDGHWVMVAVEAVDRRVAVYTSPDLIAWTRRSHFGPAHATGGVWECPDLFPLRVRGTDEVRWMMIVSLNPGGIAGGSGSQYFLGDFDGAEFTADRISASEDPADYDWLDYGRDYYAAVSFNDAPEGRRLTIAWASNWDYANETPTGPWRSSMSLVRELDLVRGADGRLRLAQRAVLPTGPASRDVRVFDVDVSRLPGDRTELRLLTGTTDDEVVLTVDGDEGVLTCDRTRSGAVDFAASFPSVDWAPLPGPDESGRIPVRIVVDASVVEVFLGGGLSTLTQLVFPSAPFTTLQVRAAAE

SEQ ID NO: 686 - protein, 546 aa, Clavibacter michiganensis
MTASPSRPPAAGLARRARDRIRPLAHRHRRALVVAVAILLVAALVVAVRGVTGADRGPVAPPPPAPRAADDGIHIRPSGEFMNDPQRPFLLDGVWHAYALVNADHPAGNGSSWRHYTSTDMVTWHDEGIAIDKYDTPLGDAETGSVVVDTGNTSGLGAGTVIAILTQQSEGVQRQSLYYSTDGGYRFRPYAGNPVMENPGGPDFRDPKVVWDGEHGRWSMALAEGRRIGFYTSPDLIHWTYRSDFARDDLGTMETPDVFPIASADDPDRVRWVLGVGADGAAQGRGTGYAYWVGDFDGERFTPDDDAPRWLDQGADLYAGVTWADPADGTAPTRRYAMGWTSSWAYAGRLPLRDGGAGGGQSLVRELRLVPDGAGWALRSAPLDALTGREGDARAIPDARIAAATPLADAPLGPSRLRLTLTPDPADPARETRVRLASPEGGTITVGYDAARRQAFVVRDDDPDGIMPDAYDRPATAPLPDAAPGDTVTLDLVLDDRTIEAFVDGDAAVLTSATVGTLDGASLSVEAVDGTTRVTDASWAPFDVGR

SEQ ID NO: 687 - protein, 563 aa, Azotobacter chroococcum
MNRNPTSRRASVCALAALLAATTVAVSVFAPAPATPSGPEPSSPLPTKASAFSRPADWSPHRPAVHLTPAKHWMNDPQRPILIDGVWHYYYLYNADYPKGNGTEWYHATSTDLVHWQDHGVAIDKYKNGLGDIETGSAVIDTESTAGFGAGAVIAVMTQQHEGVQRQSLFVSTDGGYRFKAYDGNPVMDNPGAEHWRDPKIIWDDARDEWLMALAEGDKIGFYTSPDLKRWTYRSGFERDDLGILECPDLFRMSVDGDPANTRWVLAAGGNGASKGMTTGTLYWTGNWDGERFTADRDEPRWLDSGADFYATVTWDDPRQDDAERLASRYAIGWLNNWAYATKLPTDDWHGGADSIVRRIELRSVDGEPLLVSQPVDALDKLAGNTEVRSRVRVTAASGTTLPQPESDAYRLRVELDAASSANEVRFRVKEGGGHFTTVGYNFVHGVAFVARAADAAAERMPAVYREARTAPAPARDGTVTLDIIVDAASVEVFVNGGEAALSNLAFGVPGANGLSVESLGGDTELRSFRLTPLAIAPIGRHMEQAPQGNGGSAGKPVAPAPH

SEQ ID NO: 688 - protein, 857 aa, Azotobacter chroococcum
MNNNDKHASRGRDALVCRRSTIRLLALAISAASLAMLDAAGASGNGTYQEPYRPQFHFSPAENWMNDPNGLVYHDGEYHLFYQYNPFGDTWGHMSWGHAVSPDLMHWEHLPVAIPEQGDEMVFSGSVVVDKHNTSGFGSRRNPPMVAIYTSARPGSQAQSLAYSTDRGRTWTRYAGNPVLDIGSAEFRDPKVFWYAPGRKWVMAVVAALEHKVKLYSSPDLKNWTHMSDFGPANATGGAWECPDLFPLPVDGDSGRIKWVLLVSLNPGSIAGGSGMQYFVGDFDGTTFRADNVLGDYTPPPGELYQGFEERDYGEWTTTGTAFGSGPTSGTISPQGEVSGYLGGGLVNSYHEADLGTGTLTSPPFTIEGPYLNFLVGGGKHPHDPAISDQTVPAGSVFADFEGSSYGSGWSATGTFAGSAPAAGTLAGQQSVSGYEGRQLVNTFIDYDNGTGTIVSPGFTVMSDYINFLVGGGAHPYPGTANNPPTAVTLVVDGEVVRTATGQDSEALNWTHWDVSDLRGQTARIEIVDSNTGGWGHINADHFMFSDEPALPRPTDTTVNLLIDGEVVRSTTGPNSTTLDWAAWNVRNLIGQTAQIQLRDRNTGGWGYILADHFMFADEPALSLLQRSSWVDYGKDFYAAITFDNVPDARRLVIGWMNNWNYGQLTPTSPWRGAMSVPREFSLRTIDGALRLVQQPVQELDLLGEDWQTFSQQQIPSGTTTLPLQGKAFEIKADLLPGDAKRVGLKVRSGNGEETLIGYDAEADEIYVDRTRSGEDGFSTDFPGIQRAPLAARDGKIRLHVLVDWSSVEVFGDQGQTVITEQIFPSATSDGVQLFSEGGSATLDSLQVRPLGSSWTQ

SEQ ID NO: 689 - protein, 852 aa, Streptomyces antimycoticus
MSSGRVSRHARMRLMAAVATVCALSVTPLAPRAVAADTPTYAETYRPQFHFTPQKNWMNDPNGLVYYKGEYHLFYQYNPNGDSWGDMSWGHAVSKDLGHWKELPLALSHDDEEMVFSGSAVVDWNNTTGFGTKKNPPMVAIYTSAYKNGGKQAQSLAYSTDRGRTWTKYQGNPVIDIGSTNFRDPKVQWHAPTKSWLMTVSLSAEHKVRFYASKNLKDWDLLSEFGPAGATGGVWECPDLFPLAVDGDKSNIKWVLVVNINPGGIAGGSAAQYFVGDFDGKKFTPEDKGTYTPPTGKAVQDFEGTDFGGWTTTGAAFGQGPAAGTVDGQGTVAGFDGKGLANSFHGGDATTGLLTSPSFTVDRPYLNFKIGGGRHPHEAGTVLDSTPPEGTVLADFEGGTYGGWTATGDAFGTAPATGAVPGQGQVSGFLGDGLANTFLNGDSATGTLTSSEFTIDKKHISFLIGGGNHPAAYANPTAVELLVDGQAVRSATGKDAEALNWASWDVSDLAGKKARIRIVDGNTAGWGHLNVDHIVMSDTKATPVSQETSVNLLVDGKVVRSATGADSETLDWASFDMRPYLGKKAQIQVVDMNTDGWGHVLADQFTAADAPAKSLVQRADWADYGKDYYAAVSWENAPGDKRYMIGWMNNWDYGQSVPTSPWRGAQSVPREMALRTVGGRVRLTSKPVGSLASLRYKRPATATGVTVKSTSKPLTDSAAKGKALDIEATFSPKDADRFGLKVRIGAGGEETVIGYDTTTQELYVDRTRSGAGDFNSTFPGVQTAPLKPKNGKVKLRILVDWSSVEVFGGSGEAVITDQIFPDPSSTGVEVFAEGGTATLDHVRAWQLKSIWR

SEQ ID NO: 690 - protein, 538 aa, Flavobacterium sp.
MKSKKHLPLALYSAVLLSIAGFKPSSATAQTAAVTVSSTAEEQMYRPNFHFTPKKGWMNDPNGMFFANGYYHLFYQHYPDGNTWGPMHWGHAISKDLIKWEELPIAIYPDKDKYIFSGSAVVDTHNTSGLGTGKNAPIIAIYTLHDMTKEKEGKIDVERQDIAFSNDNGFTWQKFEEGNPVVKNPGIRDFRDPKVSWDETHKQWIMVLAAQDRVQFYKSSNLKNWELLSDFGKNIGAHGGVWECPDFFEIKVEGTKETKWVLIVNLNPGGPNGGSGVQYFVGDFDGKTFTMDKSFAERVKNEKAVWADYGKDNYAGVTWNNVPASDGRRLFIGWMSNWEYAQQVPTTTWRSSNTIPRELQLVKKGNHYNLVSKPVRELNNYAAETIKVQNLNGKGTLKVIESGKADLTKAVISLDLKNLKQDDYIFTLSNSDGASLRFGLNNKENFLFIDRSKAGRIDFSDKFASTVSKAFLEGSQKSAAFKIILDKTSIEIFYNNGEKVMTEIFFLNKPFSALSLSSKEKIELKNGIVQVLDIDKKQ

SEQ ID NO: 691 - protein, 502 aa, Arthrobacter sp.
MNSVTPTLDTYRPAIHYAARNTWLNDPNGLVFHEGVYHLYYQNNPYGNVHSNMSWGHATSADLVSWEEQPVAIPCDETEEIFSGSVVVDTGNTSGFGADGKAPLVAIYTSAYKPGSPHQGTQAQSIAWSTDGGYAWTKYAGNPVLTRNSPEFRDPKVFRYDGPGGSYWVMVAVEAHDFTVLLYRSEDLKNWEYLSTFGPANGTGGIWECPDLFELPLNGDTSVRKWVLTVNMNPGGPNGGSAGQYFVGEFDGATFRSETSLTEGLQDPERVPDYQWLDWGRDYYAAVSFSNVPKNRRLMIGWMNNWQYANHIPTAPWRSPMSLVRDISLVSVNGQPRLVQQPAPEVKATSESGPLQWLTINGQAAVEGGAAVQAIDIIFTPGGAEEFGLVVRGSADGTAGTRIGIRPRSGELIVDRTRSGDTGFHEAFPSTSLAPIAARQDGSYALQIFVDHCSVEIFANYGLATVTELIFPDRAQKSLTLYSTGGTADAALQLIDLGKEKA

SEQ ID NO: 692 - protein, 561 aa, Cryobacterium sp.
MESSPATAGTPTGKNGGKKRRARLIVIASVVVLAVAGALTWALLARPTAQPPVTSSQTPAPQPTDARQFERPTDWSDYRPALHLTPAHNWMNDPQRPFLLDDVWHYYYLYNADYPNGNGTEWYHVTSTDLVHWKDEGVAIEKYGNGLGDIETGSTVIDVDNTAGFGAGAVIAIMTQQADGIQRQSLFYSTDDGYTFTSYEANPVMENPGTTDFRDPKVIWDAAGQVWVMVLAEGAKVGFYTSPDLTEWTYVSSFERDDLGTLECPDLFQMSVDGEPANTRWVLAASAHGSKYDKTTGLAYWTGDWNGTSFTPDSEAPGWLDDGADFYAAVTWDDPRESAEERLASRYAIGWLNNWGYAGDLPTTDWQGGMFSIVRSIRLVDLDGAATLVSQPVDALSELGGEAITAETTVLPPGDSDTLPQPGTGSYRLQVTLSPDEAGPAREVRLKIKDGGGHFVTVGYDFALQNVFIARDADAAAATMPELYRAVRGVSSPLRDGAVDLDIFVDYSSVEVFADGGRQTLSSLAFGEPGANGLRVESVDGSTVVRSLTLTPLAVAAPERQ

SEQ ID NO: 693 - protein, 609 aa, Bacteroides sp.
MNVFLPLRKLQTLLICSIFMNISLLALAADPSLLMKDLGEGHCLVRVNTTQKYLLLPVEDASPDVRISMIADNKEVKSFDVRLAINKVDYFVPVDLSDYSGKLVSFKFKMNSNDPVRVNLSPDNTACCREMKLSDTFDTTNREKFRPVYHFSPLYGWMNDPNGMVYKDGEYHLFYQHNPYGSKWGNMNWGHAISKDLINWEHRPDAITPDAFGTIFSGSAVVDHNNTAGFGAGAIIAIYTQNGDRQVQSIAYSTNNGRTFTKYADNPVLVSEARDFRDPKVFWYEGTKRWIMVLAVGQEMQIFSSPNLKNWTFESSFGKGQGAHGNVWECPDLFELPVEGTNEKKWVLLCSLGDGPFGDSATQYFVGTFNGKEFVNESPSKTKWMDWGKDHYATVTWSDAPDNRRIAIAWMSNWQYANDVPTSQYRSPNSVPRDLSLFTVDGETYLQSAPSPELLKLRDVSKKRSFKVNGTRIIKDMIAGNEGAYEIELTIENQHADIIGFRLYNDKGEEVDMQYDMKEKKFSMDRRKSGDVGFNENFPMLTWTAIESGIDELKLRLFVDKSSVEAFGDGGRFVMTNQVFPSEPYTHIDFYSKGGAYKVDSFVIYKLKK

SEQ ID NO: 694 - protein, 626 aa, Bacteroides sp.
MKTNPWMKLCKGAILALAVSYGLTYCHTTKSKLTLEQKNDSLTVIHITNPTNYILLPIEEEAAESQVQLDTGEAADTDMDIRLAQTQVDYFVPFALPVGAKTATVRVRNKSKDALCWKEIKLSDTFDTANTEKFRPVYHHTPLYGWMNDANGLVYKDGEYHLYFQYNPYGSKWGNMHWGHSVSKDLMHWEHLAPAIARDTLGHVFSGSSIVDQENVAGYGAGSILAFYTSASDKNGQIQCLAFSKDNGRTFTKYEKNPILRPADGLKDFRDPKVFRYEPEDKWVMIVSADKEMRFYDSKNLKDWNYMSSFGEGYGVQPCQFECSDMVELPVDGDLNRKKWALIVNVNPGCYFGGSATQYFTGDFDGTKFSCDSQPNVTKWLDWGKDHYATVCFSNTGERTIAVPWMSNWQYCNIVPTKQFRSANALPRELSFYTQDGEIYLSAAPVPEIKTLRKEKKEIPAFMVGNDYHIDSLLADNEGAYELALEITAGEAEIMGFSLFNDKGEKVDIYFNLPEKRLVMDRTKSGIVDFGKKSVPHEIEVHDRRKTASINYIDDFALATWAPIKKENKYTLDVFVDKCSVEIFLNGGKVAMTNLIFPSEPYNRMCFYSKGGTFHVDSFNTYRLGL

SEQ ID NO: 695 - protein, 529 aa, Flavobacterium sp.
MKFTNKITYFFILLGVSLSLFSCKKETKNDVITIDASGKLAVDSSKKYKEPFRPQFHFSPEKKWMNDPNGMVFYKGIYHLFYQYYPDDIVWGPMHWGHATSTDLIHWTHQKIALFPDKLGMIFSGSAVVDLKNTSGLGTKENPPMIAIFTYHDMAGEKAGKRNYQTQGLAYSLDEGETWLKYNGNPIIGNVDQKDFRDPKMFWNTETNLWNMVLVAGDKAQFYTSKNLIDWKFESEFGKNIGAHGGVWECPDLFKLKVAGSNEEKWVLLISINPGAPLGGSGTQYFIGDFDGKSFKTTQKSIKWIDNGADNYAGVTYNNAPENKRIFIGWMSNWSYARNTPTKNWRSAMTLPKELSLAKIKGNYVLKNVPVEQFKKQETIAFSKDEIILKANQKTTFNYQYLNQSAVQFNAKNENLKLVFSNDVKDSLVMNYDAKRKTFSVDRRHSGIVNFEKSFGEEIHNTKISNIISEAIDYQIIVDWSSIEIFLNGGVYSFTEQIFPNKPYTKLTIQSDENQEIKNFSIAEIKGIW

SEQ ID NO: 696 - protein, 549 aa, Bacteroides sp.
MKTLNSRITLTLFILVSSHLLAMAGDVSFKVTKKYLNFPVSHAENRAKMTFEVNGKPDLSVVIRLAPDKAEYWVFKDVSAFKGKTIKITYEGNEKGLSQIYQSDEIAGQDSLYKEKNRPQFHFTTRRGWINDPNGLIYYEGEYHLFYQHNPFERDWENMHWGHAVSKDLIHWTELPDALYPDHLGTMFSGSAVIDYDNTAGFNKGKTPAMVAAFTAASSDRQVQGIAYSLDKGRTFTKYDKNPVINSKEKWNSQDTRDPKVFWYAPSKHWVMVLNERDGHSIYTSANLKDWKYESHVTGFWECPELFELPVDGDKNHTKWVMYGATGTYMLGSFDGKVFTPEAGKYCYTTGSIYAAQTYNNIPASDGRRIQIGWGRVSHPGMPFNGMMMLPTELTLRTTKDGIRLVSVPVRETESLFTPVHSWKSLTSDEANRNLKEFYDADCLRIKTTIKLSHATDAGFNLFGQRMIGYDMNSNTLNGHFYSPQDPTSMELTADIYIDRTTIEVFIDGGLYSYSMERRPDRNNKEGFHFWGNRIEVKNLEVFSVKSIW

SEQ ID NO: 697 - protein, 1191 aa, Paenibacillus sp.
MVMGLPLTPTFAADPGYYDETYRNQIHFSPEANWMNDPNGMVYYKGEYHLFYQYHPYGTAWGPMHWGHAVSKDLIHWKHLPIALYPDENGQIFSGSAVIDWNNTAGFGKEAMVAIFTHSGDNGQVQSIAYSLDRGRTWTKYEGNPVMPDPPISDWRDPKVFWHEDSRQWVMSLAAANKVMFYTSPNLKQWTYASEFGEDNGIQANSLDTTSYAMSSQEGGSFTYEGDIALNKKNSREGSGGLVFRADKNAKNGYVVSLDAQNDVVTLNKNIDGSNTEIASKSLNLGTSSTYNVQVDVYGHDIQVFVDDQSVIKETDTEFDYGYYGLTAWNSTASFRNVNFKNTSNFATNLSNWTAVTGRWEDTLEGKSGTSPDDAFIISGKTGDNFIYNAIIDLSEGGDETGSLIFRADADAENGYMASIDALNDKVKIVKMEDGNRTVLAETTVTLDTYQSHDLKVSTLGTNIKMYLDGNLIHDIDDATFLSGHFGLHLLHSSAIFQDVQLGRNIMTDEKEITNHDFETGDLTGWTVTQGDTFSDDHVSSEATYWGGTFGHEGNYHLWGYSKLHKGDEATGELHSSYFKLGGSGEINLLLGAGDDGDNTYVSLVRAADDQELIRQANIKFNEEKYSKYVWDASEYIGEVLYIKAVDHAKDGYGHINIDDVNVYNEGAISDEVDQVAKEPERTDAKQSGLLTDWSAVSGQWIPSTNGSIGGVWECPTLVELPVDGDPSKRKWVLQVSINDGAPAGGSGMQYFVGSFDGKTFKNENTSDKVLWTDYGADYYAAVDWSGVEGENGEKYWIGWMSNWQYANDTPTSTWRGSTTLPRKMELTQTAKGLRLKQTPISLKSIRDRGDRISYTNQMISGNSHLLSKLSEDTFELNAVFDVSDTEATELGFKIRKGSEEYTTVGYDVYNEQLFVDRTHSGGFDYGSNVVGKHEGPLHAKNGTVKLQVIVDRSAVEVFGNHGTTVITDQIFADSASKGLEIYSKGGNVKLKSLDLYPLKSVWKEKSSSFKSNLSGWTTVNGKWADTIHGKQGQSKGDAFIVSKVTGRNFVYEANINVPDTDSHPGDSEKDSIDNSIGAGSLVFRSDLTAKNSYAANVDIKNNVVKFIKFVDGTGYEIATYNNDGKLDLQPNTDYHLKVEAQGNITKVYLNNKLVIDTKDQTYKEGYFGLNVWDTTAFFNEVKVKLKHKDE

SEQ ID NO: 698 - protein, 622 aa, Bacteroides fragilis
MKTTFMNVSRGVIGALAFSLGISSCQSSQSKMIFEQEGDSLTVIHITNPTQYLLLPVEEKTPEAQVCIASDSVPVDMDVRLSREKVDYFVPFALPKGEKEVAVRIRHLPKEALCWKELKLSDTFDTTNTDQYRPLYHHTPLYGWMNDANGLVYKDGEYHLFYQYNPYGSMWGNMHWGHSVSKDLVHWEHLEPALARDTLGHIFSGSSVVDDANTAGYGAGAIVAFYTSASDKNGQIQCMAYSTDNGRTFTKYEKNPVLTPFDGLKDFRDPKVFWYAPDQKWVMVVSADKEMRFYSSENLKEWTYMSGWGEGYGVQPSQFECPDMVELPVDGNPDHKKWALIVNVNPGCYFGGSATQYFIGDFDGEKFVCDNKPETVKWLDWGKDHYATVCFSNTGDRTIAVPWMSNWQYANIVPTRQFRSANALPRELSLYTQDGDIYMAAAPVEETKSLRKESREIPAFEVGDAYHVDSLLSDNKGAYEIELELAAGSAEIMGLKLFNEKGENVDIYISLPEKKLVMDRTKSGIVDFGKDSAPHAIEAHDRRKQNSINYVDDFALGTWAPVQKTGNYKLDIFVDKCSVEIFLNGGKIAMTNLIFPTTPYNQMSFYSRGGAFKVDRCKIYRL

SEQ ID NO: 699 - protein, 1012 aa, Rathayibacter sp.
MNDPNGLVYYEGVYHLYYQYNPQGTRWGNMSWGHATSTDLTHWTEQPLAIPGDAESDIFSGSIVVDKDNTSGFGTAENPPLVAMYTAAYKTGEQAQALAYSTDAGQTWTKYEGNPVIDRDQNDFRDPHVFWYDGGTPELSYWVVVTVEADDHKVLLHKSTDLKNWTELSEFGPANATGGVWECPDLFPLAVDGDPSNIKWVMVVNLNPGAVGGGSGGQYFVGDFDGTTFTSESTVGSDTLPEGTTLAGFDDGTYNGWTAKNEPGNWKDGPFGAAPATGAIDGQQAVTGFAGTGLINGFNDGDWPVGSMESPAFTLDQDHLNFLVGGGNHPHVDGTQLANDPPAGSELLFEGFEFPDQQSLADNGWTVTGDFAGGTNPSTNGGEFFLGQKRINTFEGGPKGDDNTGTMTSPEFTIDKSSLSMLVGGGFRPEGDAQTLEVQLVVDGEVVETTAGTNDGALNWKSWDVSAYQGRTATIVVQDGATGGWGHLTVDHVVLADTAAQVRSNETSVNLVVDGEIVRTATGSDSETLDWKSWDVADLAGRTAHLQVVDNNRAGWGHILADQFMLSDEPAQSRLVDYDWLDWGRDYYAGVTFDNAPDDKRIMIAWMNNWQYGEAIPTGTWRGAMALPRELSLETVDGAPKLVQKVVDQTAGLERGDEAFTLGATDIADGETALPAAAEGSVYKLDATFSAGDADSFGLSVRNSADGSQRTPITYDVASGQLSVDRTRSGDVGFDADFPSVETAPVSLDDGELHLELYVDHASVETFAQGGRATITDQVFPDPSSTGVSLLSSGGTARLESLTVTPLTPSMFTDPAAVASLTPAGAPQTVETGAAITGLGVTAANAADEPVAGADVAYTIEGPARFADGGTTATATTGADGSAPLPAATAGPGTGAVSITAVSGGVSRLLPAVTVVAPATRVDVDVTITGVKRGGSVVLTATATNQGSTPVRLSIPTAFGELKVTSLAAGRTRTVSVDTHLSRVPSGSFRVTATAPDGTRETFRVAYRGTGK

SEQ ID NO: 700 - protein, 549 aa, Bacteroides ovatus
MKLLIQKAILANILLFIGYSLSAGEIKIKIDKRYLNIPVSHKEDRHKMTFEVKGQPALSVVIRLAPDEADYWVFKDVSNLKGKTLTISYEGNEKGLSNIYQDDNIKGEDNLYKENNRPQFHFTTKRGWINDPNGLVYYDGEYHLFYQHNPFEREWENMHWGHAVSKDLVHWEELTDALYPDHLGGMFSGSAVIDYGNTAGYNKGDTPAMIVAYTAAGPDKQVQCIAYSLDKGRTFTKYTNNPVIDSKHIWNSHDTRDPKIFWYTSGNHWVMVLNERDGHSIYTSPDLKSWKYESHVTGFWECPELFELAVDGNPNNKKWVMYGATGTYMLGSFDGKTFIPESGKYFYTKESLYAGQTYTNIPNSDGRRIQIAWGRISHPSMPFNGMMLLPTELTLHTTKEGIRLFSNPIKETKQLFTPLKKWASLTSDKANDHLKEFRNAETLRIKTTFKLSHATSAGIDLFGQRILDYDMNANTINSVFYSPEDRNSMELTADIYIDKTSIEVFIDGGIYSYSMGRKAANNNQDGIRFWGNNIAVKNLEIFSVKSIWN

SEQ ID NO: 701 - protein, 581 aa, Unknown
  Description of Unknown: Pyrenophora tritici-repentis sequence
MPAPFTLFTAAASSLFAVAYAQNSSITPSASGAPTSTYSQKDVPTGVPIAGKYNQPLRPQVHFSPPQAFLNDPNGMFLDAEGVYHLYYQYNPIANIAGTQHWSHATTKDLYTWTNQPIAIFPGGPTEGIFSGSIVIDTNNTSGFFPGQDNGVVAIYTVNTPEQQTQDIAYSHDNGISFIKYANNPIIKPGGTHSNQFRDPKVIWYAPTESWVMVVAYPIDFKIGIFTSPNLKDWTPTSNFSNHGLTGLQYECPNMVEIPVEGAKEGDEPKYLMLISINPGAPLGGSIAEYFVGTFNGTHFEAEDSKTRLTDFAKDNYAGQFFYGIPSDKHQITIDWASNWQYTNEVPTAGKEVGDGFRGVMTVPRGHYLKRLPRQGLALISYPVNIKSIAEKELAYEKSLGDGTVFVDYSSVKSGAIYFEANVTGLTTGDSLDGTISFTFSSSKSGESVTGGTSLSSGDIWLDRSRTEGYQSPFFNDKFSATGLYNEADGSWKISAIMDRSIIELFLNGGELSATSLCYPTTPLDTLMVRVSGLNQTATASVGVWALKAAWLDQADVNGTVSGNTTHGGVQSRMLGTAKLL

SEQ ID NO: 702 - protein, 853 aa, Streptomyces sp.
MSSGRASRQARIRMMAAMATVCALSAAVPAPQAVAADTPPYSETYRPQFHFTPEENWMNDPNGLVYYKGEYHLFYQYNPSGSSWGDMSWGHAVSTDLVHWKELPLALSHDDEEMVFSGSAVVDRDNTTGFGTRKNPPMVAIYTGLDKDTGIQAQSLAYSTDRGRTWTKYQGNPVIDIGSKEFRDPKVQWYEPTKSWLMTVSLSTEHKVRFYSSKNLKDWSQLSEFGPAGATGGVWECPDLFPLAVDGDTKNIKWVLVVNINPGGIAGGSAAQYFLGDFDGKKFTAEDKGTYIPPTGTVMQDFENTDFGAWTTTGTAFGAGPAAGAVAGQGTVDGFDGKGLANSFHGGDATTGILTSPEFTVDSRYLNFKVGGGRHPHEPGTLLEQGDPPAGTVLADFEGGSYGDWTTTGQAFGSAPATGTLPGQQEVSGFRGGGLVNSFLNGDLATGTLTSPEFTLDKDHVNFLVGGGNHPVGSDHPTAVELLVDGQVVRSTSGKDGEALNWASWNVKDLAGKKARIQIVDDNTGGWGHINVDHIMLSDAEAQPVSQETSVNLVVDGRIVRSATGANSESLDWASFDLRPYAGKKARIQIVDLDTAGWGHILADRFTAADAPAESAVQRADWADYGKDYYAAVSWENAPGDKRYMIGWMNNWDYSGAIPTSPWRGAQSIPREMALRTIDGRIRLTSKPVGSLESLRQSGPPTASDVTVESTTQPLIGPAAQGKALDIEATFSLEDAERFGLKVRTGAGGEETVIGYDTTTQELYVDRTRSGAVDFNSTFPGVQTAPLKAENGKVRLRILVDWSSVEVFGGSGEAVITDQIFPDPAARGVQVFAENGSVRLDRARVWHLDSAHD

SEQ ID NO: 703 - protein, 627 aa, Bacteroides sp.
MKTNLVNLVLGLAFTAGTVSCQSQKNNLVFEHQGDTVTIVHIAHPAKYLLLPIQEGSKEGQVKLETGSPADTEMDIRLAIDSVEYYVPFALTQDEGGATVTIRNVAADALCWDSIKVSDTFDTTNRDKFRPLYHHTPLYGWMNDANGLVYKDGEYHLYFQHNPYGSMWGNMHWGHSVSKDLVHWEHLDPAIARDTLGHIFSGSAIVDKNNSAGYGENTIIAFYTSHRNVPGGQSQVQSMAYSTDNGRTYTKYEQNPVLTPFDGLQNFRDPKVFWYEPEQKWIMIVSADKNMRFYSSANLKQWEYMSEFGEGFGPQPNQFECPDFIQLPVDGDRSKMKWVMIVNINPGFVYGGSGTMYFVGDFDGHRFVCDTKPEVVKWLDWGKDHYATVCFSNTDSRIIAVPWMSNWQYANYTPIQQFRSANALPRELSLYTGEDKQLYLSAAPVKETENLRKDSKKLDDFTVNGEKRFETLFENNDGAFELELQLTSAGKEAGFELLNSLGEKVRIYLDAAEGRVVMDRAESGIVDFGKKVKPHDLDTEESYARYKEVTVNYKNDFALGTWAPINTAKGHKVQVFVDNGSVELFVDGGRIAMTNLVFPNEPYNSLRFYSEGGEMKISDFTIYKLGL

SEQ ID NO: 704 - protein, 1085 aa, Paenibacillus sp.
MRIKLTNTRTNLTDWQIKGQGHIEDNVQGLLLRSEPQENVLAMSATMSEDFTFEADVMVTDLQADAALVFRSSRDGCFSYMLQIVPSAGLVRLRDAAGDIERLKEERPVELQKGDIYHLRVKVEGPHLKVYWDEGYHPIIDVVDTTYASGYLGLNVWNGAALFQNIQVSDMDTNVGELLLIRGKWQPDLKGQRAEETSMEGALKIYDTAAADLVMEGSVTLNSSQPGMEAGLFFRGNQKGTKGYVTSVQGEGHQVRIHLKKANGTLVASSAMPYLDTLGSKHSLEIIAHGERIRVFVDGYTPAAIDIVDNSYSSGFIGIKATGGTAYFQDIYLTPVSNYYTEKYRPQYHYSPARGSASDPNGLVYFEGEYHLFHQDGGQWAHAVSVDLLNWRRLPLALKWNDLGHIWSGSAVADLTNTSGLFSDYGGKGLVAYYTSYNPDQPRGNQRIGLAYSTDRGRTWQYSEDRSIVIENPGQSENDPGNWDFRDPKVVWDEAHQRWIMVVSGGDHIRFFTSANLLDWSWTDNFGYGDYIRGGVWECPDLFPLLVDEGNTSKWVLMISTGASTNTQGSDAEYFIGELTSDGKFQNDLPPGKVLKTDWGKEFYASMSFTNVPGGRRIKLAWMTNWDYPFSFPTSPWKGQFSIPRELSLKTTREGIRLIQHPISELTSLRSHLFSLDHESITESSPNILEGLNAGAYEIEAEFEFPSVGMASTFGFYVREGGEQRTAVGYKTDVQQMFVNRADSGLADFSPLFSTFHEASLAPVGNRIQMRIFVDESSVEVFGNHGEVVFSDLIFPDSARRGMSFYTQGGEVKVVSLRVYALRNSWRVTEASPIRLMMDYTQLELAEGQSKRLYASVEDHSGRKGHLLNWESSNPAVVKVIVSNEGSAIVEALSLGEAVVTASIPGDTVRASTSVTVHGGMFYTNLSGWKPDVSASRWMVTADGMRGSYISDANYMASEQAKDFTYEADMKLHGNGSAGSMIFRANADGSSGYYLNLDPNMKSIRLFYKKEGRFEEQQVLTKVPRFVLPGVTYHIKIQAKGLRLRIEIDDEQVIDLEDGTFAAGHFGINVFGGQAFYQNVRVEKV

SEQ ID NO: 705 - protein, 535 aa, Unknown
  Description of Unknown: Fusarium odoratissimum sequence
MLGFLTLVPQTLAIRLFSLLLFTLYASAVPLAATKTRPSYHITPEKKWMNDPQRPFFLGDEWHLYYLYNSNFDSSNPGSGGTEWYHITSTDMVHWTRRGVVIEKYKPNPPNGIVLGDIETGSSVVDTNNTAGFGRNAVVAVVTQMADGVQQQSLFYSIDDGYSFIPYEGNPVMPNPSPGAKPAFRDPKIFWDGKAGHWVMSLAEGSKIGFYTSIDLKTWAYISEFKPENAGVDLGILECPDLYQIDLDGDSTKRTWILTLGANGYRYNRTTGTAYWTGEWDGNGFTATNSFPQWMDDGPDFYATVSWENPNDRYGSRYAIGWMNNWEYAASLPYYADFAGQDSLVREVKLKTINGSPTLVSIPIGGYEDIVASSKSVSEKTITKDPASASLPSELEEGAYIIRATISKNDGDKGNEVRFVIKSDGTFSTTVGYDFLHSQAFLVRDSDGSATDSMAAGPKQAYDTVRTAPYPSGGSTVKLVIYVDWNSVEVFVNDGVAVLSGLIYPNQGANGVRVVSDTGSLTLVSFSYAACESIY

SEQ ID NO: 706 - protein, 602 aa, Parabacteroides distasonis
MKQQTKRLLKSLCMAVGIILLSAVDPLAGYAAERTIDIKHLGEGQSIVRVDARAKYLLLPVEESSPESKLYMIVDNDVVRTFNVRLAVNKVDYFVPVDLSGYADKHISFNFQLAPESALCWKEMKLSDQFDSSNREKFRPAYHFSPAWGWMNDPNGMVYKDGEYHLFYQYNPYGSMWGNMHWGHAISKDLIHWEHQPVAIAPDALGTIFSGSCVVDKDNTAGFGAGAIVAFYTSASDRQVQSMAYSLDNGRTFKKYDRNPILTSTQRDFRDPKVFWHKESNKWIMVLAVGQEMQLYSSPNLKDWTYESSFGEGQGAHAGVWECPDLIELPVKGTELKKWVLICNINPGGPFGGSATQYFVGAFDGKQFVNESPALTKWMDYGKDHYATVTWSNAPEDRKIALAWMSNWEYANNVPTLQYRSANSVPRDLVLYTKNGQTYLSSTPSPEVLKLRGKAQKKGSFKVDRSHEVNPVLPDPTGTYEIEIKFKNNGADIMSFQLFNSKGEEVEMRYNLLDNTFTMDRRNSGITDFSKTFATATSAPISAAKEYTLRLLVDKSSIEAFDGNGEFVMTNLVFPEEPYNRISFHAKGGAFTVTSLTIYPFK

SEQ ID NO: 707 - protein, 519 aa, Streptococcus mutans
MLKKKLVCLLIGLIAFLGSLKIYAGSSESAEYQQTNHYNTPKGFMNDIQTIFKGSDGYYHMYYLLNSNYKLANDGTEWYHVRTKDWEHFENLGVAIPKFVNGWSAVATGSIFQNSNQFFKDLPTSAIVAYFTSYTDTGQHQYVAYSLDNGSSYQPYNNGKPVMTSQTKEQNARDPYIWYDSNSKRLMMYLAEGDKIGTYASSDGKNWAYQGATVLNQYTLGGKDLGLVECPNLKTFYDSATNTTKHVLFFGANGYQYGSTTGTYYMVGHLDTQGNFVPEQNAERLDQGSDYYGANFYQESDRVVKSIAWMGNWDYLQGQILDDQGQESKHLGSVSSARGITMVKRDDKYVLESYLKNNNSRTNTVSYQSNADTAKLADNGYHKTLLSVSRWHSQELSLKFQANAATLNGHIRLIFKQADAQVSLDYNTDNGYYEVKRTSSKIIGSQKVNYERSYVVDSHWNGQKELNIYLVADKSSLEFALPNGQTYSMVKLSTASDMDIVIETSGSNRLQADLANLET

SEQ ID NO: 708 - protein, 922 aa, Actinomyces oris
MLAAGSTLASMPAAASGQARPASVAPTAPNADRAGERWRPQTHYTPQKNWMNDPNGLVYYDGEYHMFYQYNPEGSDWGNMSWGHAVSKDLVHWEELGVAIPHTSQYGVFSGSAVIDTKNTSGLGSPGNPAMVAVWTRADVGGNQSQSLAYSTDKGRTWNLYNNGDPVLDIGSHEFRDPKVFWDEASGRWTMVVSHATEHRVSFYSSPDLIHWTEQSSFGGEGITSAVWECPDFFPLPVDGSSKEVKWVLVVTVADSAQYFVGGWDGSTFTPDEIPHYTGEEGTTLADFENGYAGWKADGAAFGSGPATGDLPGHQGKAYVDSFGSGDADTGTLTSDEFTVSSSYINLRTAGGKHPYNPAATGDNGGGRLLAGFDGSWEGWTVEGSAFGATPPQGATPGQQPLVNHSSAGLLNTYLDVSNGQGSDTTTGTATSPTFTIDSTYLNLLMGGGNNPRPEGDAEGSSGVSVVELVVDGKVVRSATGRNLEELNWQSWDVSDLKGKSAQIVVTDTATGPWGHILLDEVRASGRKASPIADNTSVNLVVDGKVVASATGNNSGTLEWTSMDVTAYKGRKARLVIEDHNGNAEDWGHLMVDQILQSDTKAFSGADVVPRLDYGKDYYAAVTWNNVPDGKRYQVGWMSNWAYVRDLPTTTWRTAMSTVREMGLTRVGGKLRLTAHPVTALESLRTGQELTRASTDIPEGDTSLGQAAQGTSLDISVDLKPGASSFAGLKVLDNGKQYTLIGYDSRAKQLVVDRTHSGVTDFSPKFPGRATAPLSPDSKGQVHLRVVVDAHSVEVFAADGTPVITETVYPTEDATGVSLHAEGGTAHLSSLSLWHLGAVQDAGAPAEGPDSPGPGKPAVQEPARGQAKAAAASASPTAAAAGRSASARFPLARTGASLTLGALGAAAAASGVYALRLRRRRS

SEQ ID NO: 709 - protein, 956 aa, Unknown
  Description of Unknown: Lacticaseibacillus paracasei sequence
MEMDEKKHYKMYKSKSVWVFACLSTCLIVSFFNDGQNVSAATSASSTQISQTNTGSQPNNETTGETAQSSVNSTATASSSSVADLPSSSDSKSSIGSTISQPTVDKKETSKSDTADNDLTKSVTTSDSDKALPTSKTTLPTSNEQVQSSVGQSQTDQPASSATIATNAVTSDVSQNDQYNEPYRNQYHYSSSQNWINDPNGLFYDSKTGLYNLYYQYNPEGNQWGNMSWGHAVSKDLINWTQEDVAIPMLQNQGWEDFTYTNTTGSLKDKGEVRYVGVPTTNWGDADGKKAIFSGSIVVDTNNVSGLGKDAILAFYTADYQIATRKNDGAEDGWGTWIGLTEIQEQHLAYSLDGGKTFIQYSKDGNAANPQAIIPTSMNQGGDAANFRDPSVVYDAVNKQYYLTVVSGQQALIYKSSNLLDWTYASKIERENDVGNGVWECPSLVPMKVAGTNETKWVFCISVQQGAHATGSGMQYYVGNMTADGTWVPESSKTLQNPMTMDSGEDFYAGIPFSNMPDGRTVMLAWQSNWSYVDEAKTSPWSGNMTLPRELSLKKNADTTDGYLLTNTVVKEIANNEEANVINKAESNFTVSRSDEQVQYEGKQYKISATFSWDEADKPKSVGFKLRVSDDQKYDMIVGYDLTTGLLYVQRLNTGEPNMGAPRDKMNATVNADGSITITVYVDETSIEAFANDGEKSITQNFFMRPENIGDQATTGVYVYSNDGTTKISDLTINPITSIWNSTGQLTEKFVDENGNTIASDKIQTGRVGQSYTSESATIPGYVFVKENTDHINSNQLYTTQNQTITYTYRASQASVVTKDTTLVAGPSAAWNAADNLVGATDADGNALAVSDLTVNGAVDPKTPGTYTVTYSYTDATGNKISKKATVTVIASKADIVTKDTTMVAGPSATWNAVDNFVEATGADGNALTLSDLTVNGAVDPKTPGTYTVTYSYTDA

SEQ ID NO: 710 - protein, 632 aa, Prevotella copri
MRTNNMMKAACLMLMASATTSAFAQKMNIEHKGDTTIIKVENPTKYLLLPIQEEKDEAQVLLDTGSKDDTWMDVRLAQNGSDYFVPFALGKGKTATVKILGLKKDALALNLLKLSDTFDTTNTDYYRPSYHFTPLYGWMNDPNGMVYKDGEYHLYFQYNPYGSKWGNMHWGHAVSKDLVHWEHLDPAIARDPVGHIFSGSSVVDKKNTAGFGKNAIIAIYTNNSVNHDEVQCIAYSNDNGRTFTKYEGNPVLTPFDGLKDFRDPKVFWYEKGKCWYMIVSADKETRFYKSKNLKKWTYVSAFGKGLGQQPCQYECPDFFQLPVNGDKKKMKWVMTMNINPGCWFGGSATEYFVGDFDGKNFTCPDAHDVKWLDWGKDHYATVTFSNTGDRVLGITWMSNWQYANLTPFKQNRGANGLPRELKLYEKNGKYYVSENVAPEVYALRKDTKDLADASVADAKDLKGVAANMNGAFEIEADVTPDANGIAGIEISNNKRERTMIYFDMKQGKVVMDRTESGLTDFGKQAVPHDIELAWDKQRAAEGKEPARIANSINYKNDFALATWAPLSLCEDGKKTYHVDIFIDKSSVELFVDGGRIAMTNLVFPVAPYENVKLYTQGGKAEFKNLKVHKLGL

SEQ ID NO: 711 - protein, 626 aa, Bacteroides caccae
MKTTSWMKLCKGAVLALAVSYGLIYCHTNKSKFMLEQKGDSLTLIHITNPTNYILLPIEEAAEESRVRLDIGDAADTDMDIRLAQTKVDYWVPFVLPADAKTVTVRVQKSLGDALCWKEMKLSDTFDPSHTDKFRPVYHHAPLYGWMNNANGLVYEDEEYHLYYQYNPYGSKWGNMHWGHSISKDLMHWEHLAPAIVRDTLGHIFSGSSIVDQENVAGYGTGTILAFYTSASDKNGQIQCLAYSNDNGRTFTKYDKNPILRSSDRRKDFRDPKVFWYAPGNKWIMIVAADKEMRFYDSEDLKDWNYMSSFGEGYGVQPCQFECPDMVELPVDGDTEHKKWALIVNVNPGCYFGGSATQYFIGNFDGTRFICDSKPDVTKWLDWGKDHYATVSFSNMGRRVIVVPWMSNWQYCNNVPTKPFRGVNALPRELGLYTQSGDIYLSAAPVAEVKNLRKETKEIPAFTVANDYHIESLLPDNEGAYELSLDITAEKAEIIGFSLFNDKGEKVDIYFNLPERKLVMDRTKSGIVDFGKNSVTHEIEVHDRRKTTSINYIDDFALATWAPVRKENKYRLDIFVDKCSVEIFLNEGKIAMSNLVFPTEPYNRMCFYSKGGTFKVDTFKVHRLSL

SEQ ID NO: 712 - protein, 600 aa, Bacteroides intestinalis
MNLKNNLLTVRWTLTFIIGTIWSVFSCQAINPPFVIKHLGDGQSIVQIENQKKFLLLPVEEASPEAKLYMIADNDVVRNMNVRLATNKVDYFVPVDLSGFDNKSLSFNFQLIPDTAICWDEMKLSDEFDTTNRENFRPLYHFTPQYGWMNDPNGMVYKDGVYHLFYQYNPYGSMWGNMHWGHATSTDLVSWEHQPVAIAPDALGTIFSGSCVVDKDNTAGFGAGAIVAFYTSASDRQVQSMAYSLDNGRTFKKYARNPILTSTQRDFRDPKVFWHDATDKWIMILAVGQEMQIYSSANLKDWSYESSFGEGQGAHGGVWECPDLIELPIEGTELKKWVLICNINPGGPFGGSATQYFVGTFDGKRFVNESPKATKWMDWGKDHYATVTWSNAPEGRHIALAWMSNWQYANNVPTTQYRSGNSIPRDLSLYTSAGETYLKSSPAKELLKLRGKEEKKHSFKVDRTYNLDKLLSDNTGTYEIEMTIKNRNAEIVGFQLFNSKGEEVDIYYNLVEKKFAMDRSKSGIVSFSQDFPIVTFAPIEDNSEMTLRLFIDKSSIEAFGDDGRFAMTNLVFPSEPYNRISFYAKGGSYTVSSFKVYKLK

SEQ ID NO: 713 - protein, 534 aa, Curtobacterium sp.
MTSEFRRRALLQGAGISALALFAATAPGEAARAASLSRPGAPSAASAVTGTSLRARYHMTPPAGWLSDPQRPVFTRGAYQLYYLHSDVDNGDGGWDHVSTTDGVDFTFEGTVIPLQTNLPTWTGCTLIDTDDTAGYGAGAVIALATRPTGGVRKYQEQYLFFSTDGGFTFTARPDPVIVNTDGRAATTDAEVSNAEWFRDPKVAWDAARSEWVCVIGRQRYAAFYTSKNLVDWTLQRNFDYPDHDLGGIECPDLFQITADDGTTHWVLAGSMDAYNVGLPCTYAYWTGSWDGTFFTADDPTPQWLDWGWDWYAAVTWPAVEAPDTKRYGIGWMNNWKYADRQVPTDASDGYNGQNSIVREITLRRRSAGGYALISEPVAALRSAATRTVPIADQSVNGSTVLPYDGRAYEIELDVTWSDATNVGVSVGRSADATRSTNIGTAGGDLYVDRARSDRAGFALSPYTRAAAPVDPATRSSHLRILVDTQSVEVFVDDGATVLSNQVNFDTGDTGISLFSDGGTATFSGITIREYGGE

SEQ ID NO: 714 - protein, 572 aa, Prevotella copri
MKKIFVSALVALCGFTASYAQQASFLSNNHCLYRISQESQNQKCLLLPVQEDAEMANIKVIADNKQVKALNVKLAKDHVDYFVPLYMDEFAGLKGLALDIHVNGDYSKEGLNALTCWKEMKFSDAFDMKNREQYRPDFHHTPAYGWMNDPNGMFYKDGVWNLYFQYNPYGSQWENMTWGHSTSTDLVHWKFQGAPIQPDAIGTIFSGSAVVDKNNTAGLGKGAVVALYTSAGENQTQSMAYSTDNGKTFTKYEGNPIITSTVPDFRDPHMFWNEDIKKWNMILAAGQHMEIYTSDNLKDWKLESSFGEKYGNHGGVWECPDLMKLKVRGTDKEKWMLICNINPGGPSGGSATQYFVGDFDGYKFTCESKPEVTKWMDYGKDHYATVTFDNAPEGRHVAIAWMSNWQYANQVPTQQYRSGNSIPRDLGLFEYKGETYCSVVPSPEMTAARSKKAGKKLTESCEMVVNLKGNATITLSNDKGEKVVMNYDAKAETFSMDRTKSGKVDFSKDFAAVTKAPTYGKISQLRIFIDKSSIEALDADGKMSMTNLVFPSKPYNKVTVKGKGKYQVYDIK

SEQ ID NO: 715 - protein, 618 aa, Bacteroides stercoris
MKHYSHRTLLPFWGKVIVTSLIIIMNIGICAAQSAGLKIHYLGANHSLVQVREPQKYLLLPVEETAPEATVNVLVNNKTDRSFQVRLAVNRIDYLVPFDLEQYKGKTVTFDIHTGNSRANVRDAMADACWKELKLSDTFDDANREEFRPLYHHSPLYGWMNDPNGMFYKDGEYHLYYQWNPYGSMWGNMNWGHSSSKDLISWQHHPVAIQPNGLGTVFSGSSVVDKDNTAGFGKGAVIAIYTSAGASQMQSLAYSLDNGMTFHVYENNPIIAADKECRDPNMFWHEKSGKWILILAAALEKEMWIYSSPDLKNWTKESSFGHGYGAQDGVWECPDLMELPVRGTDRTKWVLICNINPGGPFGGSAAQYFVGDFDGKTFTCDTKPEITKWMDYGKDHYAAVSWSNAPEKRHTVIAWMSNWQYANNVPTKQFRSANTLPRDIELYEGSDGELYLAVTPAPEVNALRAGKALKYGSFSAGTKKVSRKLPAENSGICEINLELVPRSAGKVYITLSNDKDERTVMTYDLENSTFSMDRTASGLTDFNKDFPAITVAPCPAEAKLRLRLFVDRCSVEAFEGDGRFAMTNLVFPQHPYTTVSVAVDKGRCKVNDLTVNSLKVNN

SEQ ID NO: 716 - protein, 608 aa, Bacteroides caccae
MNVLFSFKQLRTLLAMLAMMIFSFPDAVADAPSLIIKDLGEGHCLVQINTNQRYLLLPVEEVMPDVRVSMIVNNKEVKAADVRLAVNRVDYFVPLDLSGYTGKNVLLKFKLGSNDPVRGKLSAVCCKEMKLADTFDTGNREKFRPTYHFSPLYGWMNDPNGMVYKDGEYHLFYQYNPYGSKWGNMSWGHAISKDLVNWQHLPVAIAPDALGTIFSGSAVVDTDNTAGFGAGAIIAIYTQNSDRQVQSIAYSTDNGRTFTCYENNPVLTSDVRDFRDPKVFWHKETQRWIMILAVGQEMQIFSSPNLKDWTYESSFGEGQGAHGGVWECPDLFELPVEGTNEKKWVLLCNLNPGGPFGGSATQYFVGTFNGKEFVNESPSKTKWMDWGKDHYATVTWSDAPDNRRIAIAWMSNWQYANDVPTSQYRSPNSVPRDLGLFTVGGETYLQSAPSPELQKLRDISKKRSFRVNGTRTVKEMIPVNEGAYEIELSIKNLHADVIGFRLYNDKGEEVDMQYDMKENRFSMDRCKSGDVGFNENFPALTWTAVESGKNELKLHLFVDKSSVEAFGDGGRFAMTNQVFPSEPYNHIDFYSKGGAYKVDSFIVYRLKQ

SEQ ID NO: 717 - protein, 628 aa, Unknown
  Description of Unknown: unclassified Bacteroides sequence
MAVKWSIALFASLCCLLFWGCKQATHFQMQLEHMNELESIIYVEGQAKILLLPIQESADESLLQIESGDGNKIMQTLDVHMAVDSIDYFVPLDLDNYRQGSGETIMIRMKGLYNNAVTWDAIELVDTFDTTNRETFRPIYHHTPLYGWMNDANGLVYKDGEYHLYFQYNPYGSVWGNMHWGHSVSKDLMHWEHKAPVIARDSLGHIFSGSSVVDVENTAGYGAGAIIAFYTSASEKNGQIQCMAYSKDNGYTYTKYEKNPILTPFDGIKDFRDPKVFWYNPEKKWIMIVSADKEMRFYASYNLKDWTYLSAWGEGYGVQPRQFECPDMVQLPVNGNKDYMKWVMIVNVNPGCYFGGSATQYFVGNFDGTKFVCDSPKETVKWLDWGKDHYATVCFSNTCDRVIAIPWMSNWQYANIVPTKQFRSANALPRELGLYEQDGEFYVSITPVKEVRDIRKEVREISTFMVDTEYHVDTLLNENSGAYEIEMQFVNGTANIMGFKLFNEKGEEVDIYLDLLESRLVMDRTKSGIVDFGRNSQSHILETHDKRMKTSINYIDDFALATWGPIVKTMSHTLNIFVDKCSVEIFLDGGKVAMTNLVFPNEPYNRMSCYAKGGSYKVNNCRIYRLGF

SEQ ID NO: 718 - protein, 510 aa, Bacteroides stercoris
MIKSLYHTAASKALAAVTTGLLLTFIAACSDDEKDALSIDTNTYYDEAYRPSVHFTPKTYWTNDPNGMAYLDGEYHLFYQYNPMGSVWGNLSWGHAVTKDLMHWEHLPVALTKDANGEIFSGSIVIDRDNTAGFGKDAMIAVYTSNGQKQTQSLAYSLDKGRTFIKYKNNPVLKDDAKPDFRDPKVFWYAAGSKWIMSLATGQTITFYSSSDLKEWKKLSDFGDGIGAHGGVWECPDLIQMDYNGQKKWVLLVSINPGGPNGGSATQYFVGDFDGVTFKADNLPYPLWIDYGKDNYAGVTWNNVPDGRHLFIAWMSNWQYAGVVPSMTWRGGMTLPRELALQKDADGRPIITSRIVKEVDAIAGEWKTISASDNTYAIDNNEDAYELQINMDIADNENLTLTLSNEKGDKYPISLNRADKSFIIDRTQSGEVSFSSEFGKVLYSPLNLSSNAVSLTLFVDKSSVEALINDGMVQQTNLVYPSGIYNSLSVESGKGQIIKSVKVRTLSSVW

SEQ ID NO: 719 - protein, 519 aa, Unknown
  Description of Unknown: unclassified Sphingobium sequence
MKKISLLLAAGAALATSASAQRVDPRPSYHFAPAKNWMNDPNGLVYYDGEYHLFYQYNPHGDRWGHMNWGHAVSRDLVRWQELPIAIPETADVMAFSGSAVIDWNNTSGFGRNGKPPMIAIYTGHNPKAKLQSQYVAYSNDRGRTWTVHGEVLSVGSPEFRDPKVFWHAATKRWVMVAVMALENRAVIFTSPDLRQWTFASNFGPAGARGKNWECPDLFELPVNGGAPGEKRWVLGINLGDNAVGGGSGGQYFVGDFDGTKFTPVKGWPGDAQWMDYGADFYAAVSWNDLPKEDPRRIWIGWANDWRYAEAIPTWPSRGLMTVPRQVTLWKSAEGYRIVQMPVREVTSLHGDRKDFATALSENPTSLPIVGGSADLEFTIDGGSSEQVVIALTDDQGYQTVIGINPTVNEVFVDRTRSGPHFHDGFANRHVAPVDLKSRRVKLRILADESILEVFVNDGERTITDRFFRGGGALRWSASSRGGNAQLKLTAWTMNPSEASTLARAVSPKPRTAAMLAPS

SEQ ID NO: 720 - protein, 458 aa, Rathayibacter rathayi
MTTTALSVRPAVHFAPARNWMNDPNGLIHHGGRYHLYFQHNPSGDDWGNMSWGHASSADLLEWTEHPVALLHDEQEGVFSGSIVLDAANSSGFGSVEHPPLIALYTSDREGSQAQALAWSTDGGETWSKHGVVLDRGTADFRDPKVIRYEDHWVMATVEALDRQVHLFRSDDLRSWTPLSVFGPGGATDGIWECPDLFPLDGRWVLVLSLNPGNPAGGSGMQYFVGDFDGTTFTATSWDWLDRGHDFYAGVTVADSPEPTMIGWMSNWAYADAVPTSPWRGSAALPRLLSLKGERLVQRPALPPTGEPDFSWQDPSPDSGLLLLPESAHGRALRIRLRCRPATAALELVVRASADGSRGTVVRVEADRLCVDRRESGDVRFSPVFASVSEAALPTGADGSVELDVWVDVSSIEVFADGGRVVVTDQVFPADDDTAVLLRAEPSILAGATLDVTVLDGR

SEQ ID NO: 721 - protein, 532 aa, Unknown
  Description of Unknown: Wallemia mellicola sequence
MKLPYSTLTSASLLAGRAATDNNQCFGSSTGQPLSEGTYAEPLRPQIHYTPSENFMNDPNGLIYANNVYHLYHQWNSKENVPGYQNWGHATSEDLLHWDLHPAAITPDNDDGPFIFSGSAVIDENNTSGLFDESTSPTNRLVAIYTEASSEKIQSQHVAYSTDGGYTYTKRPEPVIDINNPEFRDPKVFWYEQDSKWIMIVSLASQHQMIIYESKNLIDWNETSRFGNVGQLGYQYECPDLFPLKIEGSDEEKWVLITSVNPGAIRGGGSGTSYFIGDFDGKTFTPIDTAVREMDFGYDDYAGVTFNNVPDGRRLWIGWASNWLYTGNVPTEPWRSSLTLVHELSLTQVDLTDQHQALALRHKPVDLSSLITETVKETISPMSSDSIDFPTKGAVDLSIDVSFSSETEASKSSKSASRITIESEDGVNSIEFGVQFSDHIVYVNRANSGWSAPTFGSLGATSITIPDDNKVNLRAVIDHSQIELFVQDGIHFASMVFYFQDGRVPARLRYENEEGVTIDHLKLDALKSIWEC

SEQ ID NO: 722 - protein, 528 aa, Unknown
  Description of Unknown: Wallemia ichthyophaga sequence
MKIPYSTLTSASMLASRAADLQCLGSSTGMPLSPGTYSEPLRPQVHYTPSENFSNDPNGLIYANNLYHIYHQWNAKANLPGYQNWGHATSEDLVHWTLHPAAITPDSEDGPFIFSGSAIIDFDNDSGIFNDTTASDNRLLAFYTSASDDKQTQNIAYSTDGGYSYTKRPEPVIDIDNSQFRDPKVFWYEPDSKWVMIVSLASQHEMIIYDSNNLLDWTETSRFGNVGQLGYQYECPDLFPLKIEGSDEEKWVLITSVNPGAINGGGSATSYFIGDFDGKKFTPMDLAVHEMDFGYDNYAGVTFNNIPDGRRLWLGWSSNWLYAAEVPTAPWRSSLSLVHELSLARVNLTDQEESLMLRHKPVDLSTLITDTVKETSTSTNSDSVEFPTDGAVDFTAHLSFNSLNSNSSSKSASRITIESEDAQNSIEIGLQFSDHIAYINRANSGWSNAIFESVSATSIHIPDDQKVSLRAIVDHSQLELFIQDGIHLGSMVFFFEDGRVPARLHYSNDKGVQTDYFRLDALKSIWQC

SEQ ID NO: 723 - protein, 540 aa, Arthrobacter sp.
MTYPNPLLSRRRMLAASAAVVVSFAAASCTAGPTPSPAPAGRTPTPSDPWRPVAHLTAEKNWLNDPNGLVYHDGTYHAFYQYNPRANSWGNMSWGHSTSTDLVHWEQQPVAMEASGEEEIFSGCMVMDTKNASGLGSAENPPMVALYTSAYGKNGALPQGAQAQSVAYSLDGGTKWQKYQGNPVLNLAPTNNNFRDPKIFWYEPGQYWVMTTVVADAQVVKLFKSTDLLHWDYLSDFSGAGAQGGLWEVPELVRMNVEGSTAKKWVMLLSINPGGIAGGSGMQYFVGEFDGTHFTAENAAAPDAPLSDSQWLDHGADYYAANSITGAPGEKPVLLGWMGNWDYAQHVPTTPWRGSMAIPRELTLVRGGHRYELRSAIATAAREALERRSGEVRRKNLTIGSSVQDLGADFTGRSQLIELELDLGSSKEAGVILRQSPDGTSGLRVSYTKETRTLKVDRSQAGTTNFSEKFSPYHQVPLPSAGSDGKVRLTILLDASSVEVFAQDGVAVISDTFFPDWDATGSSVFSVDGESTISVQSRPL

SEQ ID NO: 724 - protein, 514 aa, Unknown
  Description of Unknown: Meyerozyma guilliermondii sequence
MRAFLALIFLTFVMNVESSRPLMAFTPSHGWMNDPNGQFYDSKNELWHLYYQYNPNDTVWGTPLYWGHATSKDLSTWKDYGATIGPDRDEDGIFSGNIVVDHNNTSGFFNDSIDPRQRVVAIYTYNTEGSQTQHVAYSLDGGYTFEKYEHNPVLDVDNINFRDPKVFWHEPTNQWIMVIALSQQFKIQIYGSIDLTNWSLHSNFTGGLFGFQYECPGLIEVPVEGTDESKWVMFIAINPGSPLGGSSNQYFIGSFDGFEFVPDDSQARLMDYGKDFYAFQTFDNAPKESGVVGLAWASNWQYANLAPTKEWRSSMTLARQMTLASRNMNPETKVLSLLQKPIFGESVVAANKISKRNITGQDEQAVKIHKNSTGTFSFDITFSVDSSKNQTGQLQVISGQNGESIRAGFDPTAGQFFVDRGNTSGLKENPFFTDKTSAYVEPWKHQNDLPVYKMFGVIDGNLIEVFLNDGIATLTNTFFIPGTEGLEYLEIESSSDAIHIVESEVKELKLRATS

SEQ ID NO: 725 - protein, 407 aa, Unknown
  Description of Unknown: Fusarium subglutinans sequence
MIIHHGHKAWFTPYPSRLVSLVLVTLLTSFTKADDFRPLYHFAPDQNWMNEPNGLIKIGSKWHLFFQHNPTGNFWGNLSWGHAISADLVDWTHLPIAISSANGIQAFTGTSYFDEDNTSGLGTSESLPYLAFYTGYFPDTAVQDQRLAYSLDQGETWIKYNENPIISQAQEKPHDNPGHGPRPRRAKQTIILDILRCQGLDMEDDLTAADIPGLPRDITGWEVPDLFELPIEGSPDTKWVLIITPAQGSPAGGNGVFAVTGSFDGTSFTPDPVDPTKMWLDFGRDWDGAYSWENVPTSDGRKILASVMNSYGVDPPANTWKEMLSFPRTLQLRDIDRGVRFIQQTVHELDSHGTSLVKIVNETLEPVTNLFSEYLGTVLDIGISSVLTRGSILSLAVYKGNLKEAII

SEQ ID NO: 726 - protein, 630 aa, Unknown
  Description of Unknown: Pyricularia oryzae sequence
MCLLYAGIAALLFRYPTCPANLVPAPSGTTAALPRIAPELEVAEGHRADSSEMLLSPAHSVMFATGSVLVAASVAAAQNVMPFVNPAVPTGVPIPGNYSGPLRPRVHFTPPQHFMNDPNGMFRDANGIWHVYYQYNPTGLVAGNQHWGHATSQDLYHWNNQKIAIFPPEETIFAYSGSIVVDVNNTSKFFPPGKKDGVVAILTLAQFMEDGTAGPQTQALAYSMDGGFTFEYYDKNPVIGGTSSQFRDPKVFWFQPPPGSQFMEGYWVMAVAYSHEFAVGIYTSTDLKDWTPRSNFTNRGLLGAQYECPGLVKMPIRDGVGGPVIGEAYVLIVSVQPGAPLGGSVTQYFPGNFNGTHFFPFDDATRLTDFAKDNYAAQYFEGLPSNMNAVNMGWASNWAYAQLTPTGQLEGWRGGLTLPRSNYLTKAPRIGWTMVDEPYNLAPVLSVNPNDGDSELTEADSKSLDMTAWNSGAFLLDVLVTGLEFKKLNPDASLNFTLSAPGNSSESLKFGMYFAGDRPFFIDRGHARSLFEDNVFFTDKFSTADVWDTTPGSNWTLRAIIDRSIAEFFVDGGIHSATVTIFPSQPLSVLGVQSGGLNTGAKVNLSVKPLQDTWVRNGRPPSGDADGDDA

SEQ ID NO: 727 - protein, 507 aa, Unknown
  Description of Unknown: Diaporthe helianthi sequence
MFLAGLAWLLCWSQPISAVDFRPSFHFVPDRNWMNEPNGLIKIGTTWHLFFQHNPNENVWGNLSWGHATSDDLVRWKYLPVAIPSSDDIQSFTGTAFYDSSNDSGLGTSDSPPYLAFFTGYFKDSGVQDQRLAYSVDEGATWTKFAGNPILSQQEEAPHDVTAGLETRDPKVLFHGPTSKWVMILAHGGQNKFTFWTSDDTKEWTWVSEVANIPGLPSDVAGWEVPDFFELPIEDSTETKWVLLCTPATGSPAGGNGNFAVTGLFDGTLFTPDVFDAASNWLDYGRDFDGSLSWENVPASDGRRIIASVMNSYGSDPPTNTWKGMLSFPRTLKLKTLGDGRLHFLQMPVAELDAVTRPLTRLRNQTLAPGQTLLSDVHGRALDIRLSFIPGAGSSLYLAVRKGADQQTVIRYSEPTKQVSTDRTVSGNIGFNPAAGGVHNASVSADPDGSVALRVLVDECSIEVFGGEGQVVFSELIFPDTASDGLALATEGGDIILQSVEVREVSL

SEQ ID NO: 728 - protein, 617 aa, Rhodotorula sp.
MKLLALAAFASGASAAVIAERQVLISSAIASATATGAVPPVESASSSIISSLESVTGSATTFAGSSATASSASASSATASNAISATGTTDSASSASASSTATSSYPTPPAAAPTGVAPEGDYSGPLRPQVHFSPPVGFMNDPNGLFRDTNGTWHLYYQYNPTELVAGNQHWGHATSPDLYTWTNQPIALFPPSEDAGMFSGSAVLDPNNTSGFFGNATEGVDNVVAIFTLFTPEKQTQDLAYSLDGGYTFELYEQNPVLDLNSTQFRDPKVFWYESDQRWVMVVALSVEFKVQVYTSPDLKEWTLQSEFANAGDRGLQYECPNLYEVPVNGTDERRWVLYLSINPGAPLGGSVGQYFIGSFNGTHFESDDAAVRYDGFASDYYAEQAFYNTGDEAIAIGWASNWKTTNLVPTGAEGWRSTMGLPRRHTLVNYTRLGYVLTSEPYQLETVHNASLLDNGTETATLSGNNSIEVDFDAPAVHFALEISLPDNSTSLLSDNSTLTMRLVSSSTNESLLMGYYYGGSNAGTSWVSRAETDGFSHPLFNEKFSHTGVDLATRFDGVWDRSILEFFVDNGTFHADATAFPTALVDRFEVATDGMPDGAEVTLRLWGLRSTWEQ

SEQ ID NO: 729 - protein, 521 aa, Candida sp.
MLGSLFCLVSLISFAMALTEDPRPLIHFTPQNGWMNDPNGPWFDEKEQLWHLYFQYTPNDTTGSSDLHWGHATSTDLSTWVDHGVAIAPEEKGQGIFSGSVVVDHNNTSGFFDDDIDPRQRVVALYTLNSKDAQTQEVAYSIDGGYSFTKYEANPVLDVNSKQFRDPKVFWHEPSNHWVMVLAKSQEYKIQIFGSTDLKNWVLHSNFSAGLYGFQYECPGLFELPIEGEDKKKWVMLLAINPGMPLGGSANQYFIGDFDGYRFIPDDSQTRIHDHGKDFYAFQSFSDAPLEDGVLGVAWASNWQYAKHVPTKEWRGSTGIVRNHTLARMPANPESDLLTLVQKPVIGSSVKAERLVEEKNLTLSSSDPISAKANKTGVFDIELTFTVSAEKKVSKVINISILSNSHNGTKEEITLGYDANVEAFYVDRGIDNKFNKNPFFTDKISAFVEPLKTDKDSNKTFNLRAIVDKNLLEVFLNDGSSTITNTFFMSEGSLPESVVLSASTDDTYVVDFAVDELSLRH

SEQ ID NO: 730 - protein, 572 aa, Unknown
  Description of Unknown: Shiraia sp. sequence
MRSLLCSIVAFSSSWVYARAQSTSASPGASSTTASTYSQSDVPTGVPIAGKYDQADRPQVHFSPPQGFMNDPNGMFKDANGTYHLYYQYNPAENVAGRQHWGHATSKDLYKWTNQPIALFPGGPKEGVFSGSAVVDVNNTSGFFPNQSNGVVAIYTINLPESETQHIAYSHDNGFSFTKYAGNPVLAPGGTNPTQFRDPKVIWHAETGKWVMVVAYPVDFKIGIFTSPNLREWKAESNFTHHGITGLQYECPNMVPINIKGTSSSGHTSMYLMLISINPGGPLGGSVSEYFLGTFNGTHFVAVDSTVRLTDFSKDNYAGQFFYGISEGDQITLDWASNWQYTNVVPTAGEKLGDGFRSVMTVPRGHYLKDLPRHGLSLISYPYNIKSIIDSELALNSAFGNGTVQLDYSKLKSRALYFEANVTGLTSSDFLRGEINFVFSSSATNESITGGTSIGSGDVYLDRGKTNGFENIFFTDKFSATGLYNEKDASWKISGVIDRSIIEIFLNEGELSATSTFFSSGPLDTMSLRITGIDSRATSSVGVWALKAAWLDQAGPDGTVHGNTTSPVSRPT

SEQ ID NO: 731 - protein, 553 aa, Unknown
  Description of Unknown: Gaeumannomyces tritici sequence
MVPRRGTDKALARGKPELVWGNRPPTAKFGAARIRFGANYAVGLPLLYPLSIIARGAAADDLATTARMLPDSLRASATLAIIVAAAASPLTSTGAWARQQQQHARHSPAIARSLGVPEAGDYTGALRPQHAYYQHNPTRLSAGNQHWGHATSRDLYHWENQPEALSPPPRARASVLSGSVVTDPNNTPGFFLDRDSGVVAVFTLAEHAEDDGTPGTQTQALAYSLDGGYSFRHYDGNPAIDGDDGQLRDPKVVRHENRWVMVLAYAREPAVGIYSSPDLRHWTHESNFSRHGPPGAQWESPNLVQCRGRVGDAVLPWRVQRHALFALGRRDAHRRLRQGNYAAKYFYGLPEGSDAVGLGWASNWQYAERVPMGQLEGWRGGFTLPRVHYLAKAPRVGGPCFDGGGAAGPGGQGDGRTAALGPGESGSGAYYIDANVTGLDAARLGPDAQLNFSLSSPSTGEALRWGIDFGGGMASGSTGLGHALYGPGAPAWRMQAVVDRSIFEVFVDGGIHAATVLILPASVLNEFEVKVGGLSPDARVSIAVNGLESVWKS

SEQ ID NO: 732 - protein, 573 aa, Unknown
  Description of Unknown: Valsa mali sequence
MKYTLGMASVLLAADTCLAQNVSTYVNPAVPTGTPIAGNYTGALRPQVHYSPPQHFLNDPNGMFLDANGTWHLYYQYNPTGDVAGNQHWGHATTKDLYHWENQQIALFPPEELVYVFSGSAVVDVNNTSGFFPDQDNGVVAVLTLARYYEDGSAGPQVQALAYSHDGGYTFQYYDGNPVINSTSTQFRDPKVIWYEDHWAMVVSYSQEFVVGIFTSPDLKNWTHASNFSHHGLLGAQYECPNMVKLPIRDSAGGSVIDEAYVMTISVQPGAPLGGSITQYFPGTFNGTHFEAFDAATRLTDFAKDNYAAQFFYGLPDGSNAINIGWASNWQYAQQVPTGNLEGWRSAMTLPRANYLTNATRIGWVMTNELVDPSPVLDTPLNTTNFEGNGSITVDFSSVSSNALYIEANVTGLNASTISASSTLNMTFNSPSSNETLRSGFYFGGDQPFFIDRGHIQGFDNVFFTDKFSVADVWNTSSGTWRLQAVIDRSMLEVFLDGGIHAATVLFYPTEPVTTVTIGTADFPANVQVSISVSALKSAWAEYENEQGIVLGNVTDLEATGKRHMLYGATWGL

SEQ ID NO: 733 - protein, 555 aa, Unknown
  Description of Unknown: Magnaporthiopsis poae sequence
MPSLRDIAAFAVRFAAASSALSVHDNASTSTDSALQPVAGNYTGALRPQVHFSAPQNFMNDPNGLFLDAKGVWHAYYQYNPTELWAGNQHWGHATSRDLYHWENQPIAIFPPEDRTYVFSGSVVTDPNNTSGFFPGRDDGVIAMFTLARSNADGTAGPQTQSIAYSLDGGYSFRHYDGNPVINSTSSQFRDPKVIWHHDRWVMVLAYAQEFTVGIYTSPNMREWTHASNFSRHGLLGAQWECPNLVKMPVRDAVGGRAVGEAYVMVVSVQPGAPLGGSATQYFPGDFNGTHFTPWDGATRLAEFAKDNYAAQYFYGVPEGENAVSMSWASNWQYANTVPTGQLEGWRGGLTLPRENYLARAERVGWVMVNEVHAGFAPLLPGGGTAELGSFDFDGSGAASKMMDLGGWNSGSYYIDTNVTGLEAAKLGPDAYITFSLSSPSTGERLRWGFVFTGDTPFWIDRGEARALFQDNVFFTDKFAASDVWNTTAGAPAWRVQAVADRSILEVFVDSGVHAATALYFPAQPLSVLHVQVGGLSPNAKVRVAVMGLEGVWNK

SEQ ID NO: 734 - protein, 511 aa, Candida sp.
MHIFLLALLPLAWAFQRPLVHFTPTRGWMNDPNGLFYDEKNSLWHMYYQYNPDHIVWSEPVYWGHATSKDLTQWHDHGAALGSDNVQDGIFSGNIVVDRNNTSGFFNSSVDPELRIVAIYTLNTPEEQTQDIAYSLDGGYSFVKYAHNPVLSHNLTQFRDPKVFWHAPSSQWVMVVAMSQQYKVQIYGSADLKHWVLHSNFTLGVLGFQYECPGLVEVPVENSTDTRWVLFVAINPGLPLGGSANQYFVGDFDGFTFTPDDSQARFMDYGKDFYAYQVFDNVPKEHGVVGVAWASNWQYCAVVPATTWRSSMSLARNMTLARRHVNPETEMLTLIQRPVLGSLVRRSNRHTGNVTVHTPLTFNSSATGVFEFDLTFKVKAQNCSTAQLQVLAGARVNGTLQLVRAGYDNAVTLFFADRAMDTEINKNPFFTDKTAAYVDPYAYDGEAPVFKMYGVVDGNVMEVHLNDGLGSMTNTFFLDGDAKPDFLELSSTCPGMYSVEYSVAELTLDST

SEQ ID NO: 735 - protein, 518 aa, Unknown
  Description of Unknown: Papiliotrema aurea sequence
MFRSLLLVSAAGLAAVLQSLAQSTTSDNLPFYSGPLRPRVHFSPPKGWMNEPNGLFVDKNGTWHLYYQYNPTRLVAAAQHWGHATSVDLYHWTNQPIAGSGGSALGSRFSGSAVIDQNNTSGFFPDTDNGVVAIYTRDCCEQHLRLIAYSGDGGYSFTEYQHNPVLSPGAGQFRDPKVFWHETRWVMTVACRVYVIGLYTSPDLKSWTHASAFTPVDYVIGVYECPDLISWTHASNITHVGFLGWVLTISINPGSPLGGSITQYFPGEFNGTHFTPYDSAARLTNFGKDDYAGQYFFAEPYSIGWASNWQYTAQVPTGPEEGWRSAMTLPDCEWTRLTAAANGGIDCTVTPNADCRQPDCAGSGGSALGSRYFSGPLHLDQPTHRSFPSQLHLWRLLRLGRDQCEQHLRLLPRPGRRSRSDLHSQHAYPSSPGAGAILRRRIHFHALRRKPCAACRVEPVPRSKGLLAFNTTQAKRFSGVIDRSLIELYIDNGAVVGTMSFYPEEPLDKLEVSPDILY

SEQ ID NO: 736 - protein, 550 aa, Unknown
  Description of Unknown: Papiliotrema aurea sequence
MKLAYSLLLPLAGVSASVINYKRDGDSKAITNTTFSLNRPSVHFTPSHGWMNDPNGLFVDKNGTWHLYYQCEWTRLTAAANGCIDCTVTPNADCRQPDCAVAGNQHWGHATSPDLYTWTNQPIALFPPNSTSGVFSGSAVIDANNTSGFFPDQDDGVVAIYTLNTPTLQVQELALSYDGGYTFTPYEGNPVLDVGSNQFRDPKVVWYEDHWVMVIAYSTEFTIGIFTSNDLKTWEHASNFTDMGLLGLQYECPNLIQVPVWENGTATGDLAWIMLISINPGAPLGGSISEYFPGTFDGYTFTPYDGAARISDFAKDNYAEQYFFGTDPSEAISIAWASNWQYTNVVPTGDEGWRSAMSLPRYNYLTKVERTGWEMGSLPYKQLDAVKGRQFSYDQDFGNNSVTIDYSNVTSGAMYFSANITLPEGGVLDATSTLNLTFSSSAGDRLRAGYIFGGSNAGVGWIDRRYTLGYGEDDPLFTDRFSVAGVALAKRIEGVIDRSIFEMFIDDGAFSGTSVFFPQEPLNNLTVQTGGMPEGSRIEIAVWELDSAWQ

SEQ ID NO: 737 - protein, 530 aa, Paenibacillus sp.
MNKIKKVHLSGENNISKDPENFIYKNEYRPQIHYSPKGNWINDPNGMVYYEGEYHLFYQYTPHDTQPDFDRMHWGHAVSNDLVHWDELPPAISPGEDGAIFSGSAVVDKNNTSGFFNEAGSGLVAIYTNNGNNAQPGKPQVQSIAYSKDNGRTWTKYEGNPVLFPTETLDFRDPKVFWHEESSNWVMVLAVSDHVEFYTSSNLKDWFFASGFGSDIPGIHRGIFECPDVFKLQVDEDPNTTKWILTLSIGDRNGVNPNDSEPPAGGSGMMYFIGHFDGKVFTLDETLESFDTIQWIDYGSDFYAAVTWDGIPNEDGRKIWVGWMNNWRYASTLPSKEWRGHMSIPREIQLRTYSEGLRLIQAPISELNQLRRSILSLQDITIKPDMNVLSDVSATKMEIIAEFEIGNAIEFGFKVRKSSSSNQETVIGYNVLNEELFVDRTKSNAVDFHPDFATKHKAPMKPEHRRIQLSIYVDWSSVEIFGNNGTTIISDTIFPDLGSRGLELYAIGGELKVVSLQINDLVSIWENQPN

SEQ ID NO: 738 - protein, 500 aa, Unknown
  Description of Unknown: Paenarthrobacter aurescens sequence
MTDTTIHPAGSAQLMSRPALHYTATNTWLNDPNGLVYNQGVYHLFYQNNPFDNVWGNMSWGHATSEDLLHWTEHPVAIACDEQEDVFSGSVVVDEDNTSGLGTLENPPLVAIYTSAFKEGSGLQGTQAQSLAFSTDSGMTWQKYAGNPVLNRGSAHFRDPKVFRHEGSDGAFWVMVAVEAQHQQVVLYRSDDLKAWEYLSTFGPANATGGEWECPDLFPLPVDGDPDHVKWILVVNINPGAVAGGSGGQYFVGHFDGVRFIADTDSLVQASADGTVNLPDCLWLDWGRDYYAAVSFSNAPNNRRIMIGWMNNWDYANSLPTQPWRSSMSLAREVELTTINGLPRLVQRPVLSPGFGRNIHTVQDMEVGSSPLALPDFDTAQVIDADILPGTARVVSLTLFGATRLSFDAATHQLTLDRRNSGHTTFHEKFASTESAPVVLEDGILRLQVIVDHGSVEVFAQGGKVALTDLVFPGPGSVGTELSAEGGTATVRKLTVSAVS

SEQ ID NO: 739 - protein, 518 aa, Bifidobacterium longum
MTDFTPETPVLTPIHDHAAELAKAEAGVAEMAANRNNRWYPKYHIASNGGWINDPNGLCFYKGRWHVFYQLHPYGTQWGPMHWGHVSSTDMLNWKREPIMFAPSLEQEKDGVFSGSAVIDDNGDLRFYYTGHRWANGHDNTGGDWQVQMTALPDNDELTSATKQGMIIDCPTDKVDHHYRDPKVWKTGDTWYMTFGVSSADKRGQMWLFSSKDMVRWEYERVLFQHPDPDVFMLECPDFFPIKDKDGNEKWVIGFSAMGSKPSGFMNRNVSNAGYMIGTWEPGGEFKPETEFRLWDCGHNYYAPQSFNVDGRQIVYGWMSPFVQPIPMEDDGWCGQLTLPREITLGDDGDVVTAPVAEMEGLREDTLDHGSITLDMDGEQIIADDAEAVEIEMTIDLAASTAERAGLKIHATEDGAYTYVAYDDQIGRVVVDRQAMANGDRGYRAAPLTDAELASGKLDLRVFVDRGSVEVYVNGGHQVLSSYSYASEGPRAIKLVAESGSLKVDSLKLHHMKSIGLE

SEQ ID NO: 740 - protein, 20 aa, Kluyveromyces sp.
  MOD_RES (9)..(9): Any amino acid
  MOD_RES (13)..(13): Any amino acid
SGDSKAITXTTFXLNRPSVY

SEQ ID NO: 741 - protein, 557 aa, Unknown
  Description of Unknown: Paenarthrobacter aurescens sequence
MLAPEEPASLPPPNLQDFSPMTYPNPHLSRRHMLAASAAVVVAFSAASCTASPTPVPTPSGPAPTASDPWRPVAHLTAEKNWLNDPNGLVYHDGTYHAFYQYNPRGNSWGNMSWGHSTSKDLIHWEQQPVAMEASPEEEIFSGCIVMDKNNASGLGSAKNPPMVALYTSAYGKNGALPQGAQAQSVAFSLDNGTTWQKYQGNPVLNLAPTNNNFRDPKVTWYEPGRYWVMTTVVADAQVVKMFKSTDLLRWEYLSDFSGVGAQGGLWEVPELIQMNVEDSTAKKWVMLLSINPGGIAGGSGMQYFVGEFDGTRFTAEDAAAPDAPLDESQWLDHGADYYAANSISGAPGDKPVLLGWMGNWDYAQDVPTTPWRGSMAIPRELTLVRGEKRFELRSAIAGAAREAMEHSGEVKSKNLTVGSSPKDLGQDFKGRTQLIELEMDLTSAREAGVLLRQSSGSDSGLRISYNKEARTVRVDRSKAGTSNFSEKFSPFHQVALPSPSSKVHLTILLDSSSVEVFAAGGRAVVSDTFFPDWDNTGASVFSMEGDTDFTVTSRTL

SEQ ID NO: 742 - protein, 522 aa, Unknown
  Description of Unknown: Zygosaccharomyces parabailii sequence
MSLLTANRPLAHLTPPSGWMSDPNGLWYDAKEGLWHCYYQYNPLNAVWDIPIYWGHAVSSCGMKWEHMGIAIKPSTDRAGVFSGSAVVDYNNSSGFFSDAVDPRQRVVALWTRNTNGNQSQMVSYSLDGGYTFEEYANNPVLDIGASNFRDPKVIWHEETRRWIMVVAMSQKFEILIYSSTNLTDWKYESSFAHQGCKGYQYECPALAKIPLLNAEGEEIKSPPESNWVMFVSISPGAPQGGSATQYFIGDFNGTTFTPITPQARFMDWGRDFYAFQPSFNSPNGKDVLGLAWACNWQYALQVPTDNWKSSLTLMRQFHLQKHNTTQEYSELALYSSPVWNTDKLERGTMHHWDGIEVESNSVSIFNMTSGAKGLLEFSMEWSVNTAEVSKADFADLSLYFKGAMSEVEYLRLGFEANAGSFFIERDHSRINFVHENPFFTSKVAVDLSPYSISNGVATYKVRGIIDRNVIELFFNDGAMAATTTFFVSNENYIGWLEVRSSVNKVYKITDISAQQLNTITD

SEQ ID NO: 743 - protein, 549 aa, Talaromyces sp.
MKVYHPLNATLLGALILQVDAGQSHESYTEPYRPQYHYSPAKNWMNDPNGLVYDNCTYHLYYQYNPGGDTWGAMSWGHATSSDLTHWKEQPVALLARGFPDDITEMFFSGSVVIDERNTSGFGSDGKIPWISMYTSSYPVEQVLPSGKQVRANQQGQSIAYSLDQGETWTTYDEANPIILEPPAQYQDQWENFRDPNVFWHEQTQQWVVIMSLANIHKLLIYTSPNLKEWTLVSVFGPLNAVGGQWECPSLFPLPVNNDESNIKWVLVVGLNPGGPPGTVGSGTQYFLGDFNGTTFTADVGSISAPSNDTANWFDRGPDFYAAIGYNGLPEYERTLIGWMNNWQYGQSIPTSPWRSAMSIPRYLSLRTIGQKTALVQTPQENWASIAEEAIVSAFPSVADVHELGDIGKALEIQLTFSSRETAPGAVQGSSESGISIRASEDFSQQTRVGYDFATKQAFVDRTQSGNVSFDSTFASVYFAPLSPAPDNTVSLRIFVDWSSVEVFGGQGESTITAQIFPPDNATYARLFSTGGSTDNVQVRISKVRSTWA

SEQ ID NO: 744 - protein, 488 aa, Paenibacillus terrae
MNDPNGMVYFEGEYHLFYQHTPHDTQPDFGRMHWGHAVSKDLVHWDELPPAIPPGEDGAIFSGSAVVDKNNTSGFFNEEGSGLVAIYTNEGNKAQPGKSQVQSIAYSKDKGRTWTKYEGNPVLFPAETLDFRDPKVFWYDESSMWIMVLAVRDRVEFYTSPNLKEWSFASEFGSDISGIHRGVFECPDVFRISVDEDSSISKWILMLSVGDRNGVNPNDPEPPAGGSGMMYFIGNFDGKVFTLDETLDSFDTTKWVDYGSDFYAAVTWSGIPNENGRKIWVGWMNNWRYATTLPSEEWRGKTSISRELQLRTYPEGLRLIQAPISELSQLRKPILSLQDLTIKPGMNVLSDIFVAKAEIIAEFEINNVAELRFKVRKSSNQETIVGYNVSNEELFVDRTKSGTIDFHSDFTAKHKAPMKPEDGRIQLSIYVDWSSVEVFGNNGKAVISDLIFPDLESRDLELYAIGGELKVLSLQINDLVSIWGNETV

SEQ ID NO: 745 - protein, 490 aa, Rhodotorula sp.
MLALLGLAAAATFASAAPAVSSLPDAAGPVTTGVFSAVSSIQSFATPLIPSGASVASGASSVFSGGIPTRSFATSVSFASSMGNMSMPTSTQNASMSSTMMMSSASMASSTATGVAGGVGGSGGANSSSSAACSTSSFPASATSLPTAAPTGQVVQGDYSGKYRPQVHFSPPKGFMNDPNGCHRDQNGTYHLYYQYNPIQYVAGNQHWGHATSQDLYNWTNQPIAIFPPNSTTQVFSGSAVLDPNNTSGFFPNQTNGVVAVYTLNSPTLQVQEIAYSRDGGYSFTPYSGNPVLDVGSNQFRDPKVFWYQDHWVMAVSYANDYTVGIFTSQNLSSWEHQSNFTHYGLLGLAYECPNLIEVPFKDDPSKSAWVMFISINPGAPLGGSVSQYFIGDFDGKEFKPYDSAMRLSDFAKDNYAGQWFADTDSGDSISIAWASNWQYTQSVPTADEGFRSAMSLPRRNYLTNLTRLGWDLVSLPYDLSPIVNTSLAS

SEQ ID NO: 746 - protein, 57 aa, Bifidobacterium bifidum
MFVDRGSVEVYVNGGKQVMSSYSYASKGPRAIRLVAESGSLTVTSLTLHHLKSIGLD

SEQ ID NO: 747 - protein, 1039 aa, Botrytis sp.
MKLFLRRDIMEVSGVSGVLECPSLFQLPLNGNEANLKWVLQVGVNPGGPPGTTGSGTLYQLGTFDGTRFTAESGVTQSSPTSTITTPPTETPAPVNSSIIFESFKGTGTYASRGWNATGDLRGASPAQGTLGGQQPVTGYSGNFVNTFINLDATIGTLISPSFNITHKQISFLIGGGNLPGQECINLKIQGQVVRTATGANAEMLIPQSWDVSDLLGQSAVIEIVDSSTSGWGHIMIDEITFSDASPEVSLSRWVDFGPDFYAAVPFNGLSVADRVGIAWMSNWQYASSIPTSPWRGGFTIPRKLSLKTIDDRATLIQQPVANWTSLETVPEYTKSWDTVAEGTQALPLSGKTFDITTTFSDRTSTSSSSQYGLILRATSDLGQQTRVGYNFATKRLFVDRTKSGNVGFDGTFSSTYYAPLAPSSNGQVTLRILLDWSSVEVFGGDGQATLTTQIFPSDNGVDIWLFSTGGDTGGVKLNAKSIGSIYNTSSNPSSSTSSNKSSLVTSSTVSTSTLSSMTISTSPVSTTATISTTLSTTSRASPTPAAPYDFRPTYHFVPDQNWMNEPNGLIKIGSTWHLFFQHNPTGNFWGNINWGHATSTDLINWVHKPVAISDADGIQAFTGTSYYDPSNLSGLGTSVNPPYLAFFTGYFSSSGVQDQRLAYSLDQGTTWTKYSGNPIVSQQQESPHDVTKGLEARDPKAFFHSPTGKWVMILAHGGQNKVTFWTSPDAKSWTWKSDFTSANIPGLPSAITGWEVPDFFELQVDGTTTKKWVLIVTPANGSPATGNGVFGLTGSFDGAVFTADPIDTSTLWLDYGRDFDGAMSWENVPASDGRRIIAAVANSYGTNPPTNTWKGMLSFPRTLKLKQLNGKLQFLQLPVSELDATGTSLTKITNRILAPGQSLLADLHGKALDIRLNFIPAAGSTLSLAVRKGGNEQTLIKYSQSRTELSVDRNASGNTGYDPAAGGIHVAALQADSNGVVHVRVLVDECSVEVYGGEGESVISDLIFPAASSDGLSLTTDGGNVDLRSVEVRAITVF

SEQ ID NO: 748 - protein, 505 aa, Sphingomonas sp.
MKRTLAAFIGAGLLASGAQAQRPDIRPTYHFAPQRNWMNDPNGLVYYDGEYHLFFQYNPYGDRWGHMSWGHAVSRDLVHWQQLPVAIPETDVMAFSGSAVVDWDNTSGFGQGGKPPMVAIYTGQNVKTGNQSQFVAYSNDHGRHWTVHGKVLDIGSTAFRDPKVFWHAATRRWVMVAVMADENRAVIYTSPNLKDWRFASSFGPAGRRGKNWECPDLFELPVEGGAPGEKRWVLSINLGDNAVAGGSGGQYFVGDFDGTTFKTVPGWGDQPRWLDYGADFYATVSWNDLPKSDPRRIWIGWANNWRYANDIPTYPSRGLMTVPRAVTLHKTADGYRLAQAPVKEIEALRGAPQVRHGLTLGETPVPLPVSGGSDELAVDLDTGSARQIALTLTDGEGYQTVIGVNPAVDEVFIDRTRSGPHFFDGFEDRHIAPVDLGSGKVRLHVLVDQSIIELFINNGSRTITDRFFRGGGALRWSASALGGTATMDVTAWPLGPERNTAMLMP

SEQ ID NO: 749 - protein, 532 aa, Bifidobacterium animalis
MATLPTNIPANGILTPDPALDPVLTPISDHAEQLSLAEAGVSALETTRNDRWYPKFHIASNGGWINDPNGLCRYNGRWHVFYQLHPHGTQWGPMHWGHVSSDNMVDWHREPIAFAPSLEQERHGVFSGSAVIGDDGKPWIFYTGHRWANGKDNTGGDWQVQMLAKPNDDELKTFTKEGMIIDCPTDEVDHHFRDPKVWKTGDTWYMTFGVSSKEHRGQMWLYTSSDMVHWSFDRVLFEHPDPNVFMLECPDFFPIRDARGNEKWVIGFSAMGAKPNGFMNRNVNNAGYMVGTWKPGESFKPETEFRLWDEGHNFYAPQSFNTEGRQIMYGWMSPFVAPIPMEEDGWCGNLTLPREITLGDDGDLVTAPTIEMEGLRENTIGFDSLDLGTNQTSTILDDDGGALEIEMRLDLNKTTAERAGLHVHATSDGHYTAIVFDAQIGGVVIDRQNVANGDKGYRVAKLSDTELAADTLDLRVFIDRGCVEVYVDGGKHAMSSYSFPGDGARAVELVSESGTTHIDTLTMHSLKSIGLE

SEQ ID NO: 750 - protein, 785 aa, Pontibacillus halophilus
MKKLMVGAGVLSVFALLSISTWFLDRTAHHHSDKHTNSERKVIQNQPLYAFHFEKSQALQQEEHSYVWHDALIKKGETPQVRKGVQGDSILFDGYSTYLEIPYEETKQPTDSFTVSAWVAPRAYEWGDEGYTSAIINQHNEKEKEGYVLGVGRHGYPTFQVGISGQWIELWAPKHQTVNKGEWTHLTAVFNKEQQQIELYRNGELVQERTVPEGGTYTPSSDDPLRIGKHNQAVAVSDVFQAHHFNGLLDEVKVENRALAEEEVKQMVEEKEGDLASPNLSFNRHVYSGDPYRPNYHFTAPRAWMNEPHAPIYANGKYHLFYQFNPFGPFWHQIHWGHAVSDNMLNWEDASIALSPSEDTAARDGVWSGSATKDEHGVPVLYYTAGHDEMTPNQMTGLARPTNPDDPILNNWTMKPEPVTVQEEGLTTEEGKVRYGEFRDPFVWKEGEKWYQLVGSGVEGAGGTALVYSSNDMESWSYEGPLMIGDEEKYPKTGDVWEMPALLPVQNERTGEEKMMFVISPYFSSASPYASRYTFYWIGEWDQETASFQPDHEAPKSLDYGEHMTGVQGFVDEKGRTLLTSILQDRRGEKAKYESGWAHGAGMPMEVYLTEDNELGRRPVQEVEDAQREQLLNIENVPMKEANRKLDAVHGDTLQIQLTLDVSGTKHAGLKVFKAPDVKEETFILYNNETSELLVDRGRSSLNPSIEKGVQGGHLDLEQNELTLNVLMDRSILEIYANEEASISTRVFPTLQQSDGVQIYGIDGAPFVKSLKVWNMGTTIDGEED

SEQ ID NO: 751 - protein, 1118 aa, Streptomyces galilaeus
MRTRSPVRATTRPSPILVRLLLAFAMCLGLASPLMASPAGASGTALSNPDFESGNLSGWTTTGTAFTGAVSDKPGWGWGCCFNQQGTYHLWGFAAGGDAATGTATSEPFTLTGTGMVSVLVSGGRNDNDLYVALTALDGTVLKKATGTDDEAYRRVTWDAREHLGKQLRITVVDKATGGWGHINLDDVRVGTDPAPQVSTLSNPGFESGNLSGWTTTGTAFTGAVSDKPGWGWGCCFNQQGTYHLWGFAAGSDAATGTATSEPFTLTGTGMVSVLVSGGRNDNDLYVALTALDGTVLKKATGTDDEAYRRVTWDAREHLGKQLRITVVDKATGGWGHINLDDVRVGVDKAPDPSTTGLAAHWDFSEGKGTTTREKISEAADPISYVFNDAQYKPDSDPLWRPKREDDGVLSGALLFDGYSTWVTRAAAQTQLPTDGLTVEAWVAPRAFEWGDEGKPSAVVNQQDKGAKRGFVLGVGRHGRWQFGLGTGDAWYEVTVPKPAALAAGKWAHLSAVFAPGDGAIRLFLNGEQVAQTAVPVGARLAKADVPLIIGRHNQPAIINGTFAVNMFNGLIDEVKVHSGALTPALVAAGHAKDVQTFAGGVTPAARMEMDRSRYDGDRYRPGYHFTAPNHWMNEPHAPIQYKGKYHLFYQHNSHGPYWHNIAWGHAVSEDLVNWRDLPVALAPTEDSVAPDGVWSGDAAYDENGVPVLLFTAGNDSQRPNQATGLARPVDPADSDLVEWKMHPTLVTSQTADLNVGAGRKVRFGDFRDPFVWQEGDTWFQLMGSGVQATDGRDIGGTALLYTSKNLTDWTYVGPLMTGDVAAHPKTGQVWELPTFLPIGKDAQGRERRALLINPAFPAGPGEYSSKYVYYWVGTWDAQARRWTPDTTEPKLMDYGDHFTGPSGTVDDKGRSLVFSIAQDRRTERAHYDAGWAHNAGLPIELSMRPDGDLGFRPVEEVARLHDGEPLVDITAPTSVTAANERLANVKGDMLHIKLTLERGSAGTFGLDVLRSPGDEERTRLFYDAPAGQLGVDRTRSGNNSSAEPNLGIHKGPLALANGQLTLDVFVDRSVIEAYANSHKSITTRAYPFRQDALGLRLFGDGSTVKSMTVWKMKSMTG

SEQ ID NO: 752 - protein, 1233 aa, PaeniBacillus sp.
MVGGDNDLSQLYVALVDNATNTELLKATGTGSDAYTTITWDASAHVGKVVYIKLVDNSSTGHINLDNIVVPQSASLHAHVEPALYNHDFEQSDLYPNEIRGWTSVSGDAFAPSSLVHEEYYSQGGKFRQAGTYHLWGFKDGGDGQTGSIRSETFTLGGNGGIDFLINGGRDADNLYVALVRASDGQILFKETGRNSEGFQRVFWDASAYLGQDLYIRIVDNATGGWGHIGADDFHVLNSVYAGGLAGYWKLNESSGKNTEESVTGTTDPVAYHLNTGVYQPAQSPLWKSDGISGGALLFDGYSTYVTRTADRIATPTKAITVEAWVAPRNFEHGDEARLSAIVNQHNREAKEGFILGNYRHGTWGFQFGTGTNWREVKTDAELPLDAWSYVVATYESSTGQAVLYLNGTKVASANFTPGEALLPSDIDLLIGRNNQAFWLYGFNMNAFSGLIDEVKIRSVALGASDVQNAYDSYLGALGGNLPTANNRIDRSILADDSQRPQYHAEPPSGWQNEPGGPLYFNGQYHVFYQSNPRGPFWNHIRWGHLVSTDMVHWRDAKDAVIPEKNAVDPDGAWAGGSVLDGNDVPVIFYTAGDDRRTPGQRINIARSNYAIDQDNDLNNWIKSPRVVVNQQDGEGIMGEFRDPFVFRDGNTWFMLVTSGKKDASGNDIGGTALVYSTTDPTLESGWTFRGDLYVGDYSAYPETGRVWELPNLRPLGSSGKYIFMINPAKMSRGEYQSRYTYYWIGTWNPDTARFVPDSPAPQLLDVGEHFTGPAAGLTPDGRTVIYSIAQGRRTATIDSDAGYAHNFGLPLNVYLRPDGKLGEEPIAELQALRGTQLVNIGTDTSFAAANTTLASAVNSDMYEIEAEIDPGNANEVGFSLRRSPGAEEETIVYYKRSSKEFFVNRTKSSLNPDLEHWYQGGTVDIGTENIKLHIYVDRSMVEAYLNGLKSLTTRAYPTRGDAKGVRLWANDNTGTVVVKSLKIWEMNSAYTPVNPTGVSLPASKTIIKGDSQLVLATVTPANATNKDVIWTSSNPAVATVVNGNITAKSVGTATITAKTRIGGFTATTAVTVTAEPAHGELANHDFEDGLNGWTILSGDAFTAQDVTTANDWGWGGPFNQNGAKHLWSVQSGNDSQTGAMRSEQFVLGGNGQINLLVGGGNNYYDLYVALVRASDGKELFKATGLDQESYTRIYWDASDYIGTECYIKIVDNATGSWGHINIDDVNVPTVAP

SEQ ID NO: 753 - protein, 1074 aa, Rhodopirellula sp.
MFVSIRSFLPLLLVWPTVSCTVAIAADDIDFNRDIRPILSDRCYFCHGPDEATREADLRLDIREDAAYVLESDELLDRVQSDDPDLVMPPPHANLELTAEQKDLLKRWIEEGSPYAAHWSFEKLPRTVEVPQVKQTEWPKQTIDQFVLAKIEAAGQQPNLEADPLRWLRRVTLDLTGLPPSAETIRNFEQAVQTDREKAYTDAVDQLLQSSAFGEHMSIVWLDVARYADSYGYQSDKLNTQWPYRDWVVRALNQNLPYDDFLTWQIAGDLLEDPTRDQRLATAFNRIHRLNNEGGAVFEEWRIENAADRVHTFSTAVMGLTLECARCHDHKYDPITARDFYSLSAFFNSIDESGVYDRTEKVPCPSMLLPTEEESAALELARTKLATSERQYETVRADAKKRFHASEAASITADDIPDLRLALAFDQGFDNAVKPIYHPSESDRSWAKMCDLVPVEDCEIARLNPTLADDEKARSAAKDDSKGATSDQPDTPTKRMALKLDGERGVTTHDIEPLDRWTPFTVVVTLNDPERSPERSLIVHHTRGTDCGYNGYDLTIQDGHLESRMARVWPGNAISVRTVEPIPANQWHQVAATYDGSSQASGLKLFLNGRELETVTLRDELKKSCNVVVDHGGEFVIGQRFRARGFAGGLIDDVRLYERNLTSLELQVLATGEARPADAATFASALDQDARDALAQLRQARHEFVMAEEVIQEIPIMREMDEPRETHLLLRGEYDAETDETTRVERTVLKAIPIPFPEDAPKDRLGLAQWITHPEHPLTARVAVNRLWGNFFADPLVRTPENFGLQGDLPTHPKLLDWLARDFADHDWDIQRQCRNVVLSATYRQDSRCTQEQFNSDPTNRLLARGPSYRLAAEQIRDLALAASGLLNPEMGGPPVSPYQPGQDLWRESNGMSPPYQQSVGKSLYRRSLYSVWKRTAPLPNMMVFDASSREVCTVKRSRTNTPLQALVLLNDEQFIEAARVLATTLMSNEAPEQRIENAFLQLSGRRPDTTELEELVTLYQQEQTFFEKDIEAAKSYLSIGERELPSDVSFAELAATTSLCQVILNLDATIWKR

SEQ ID NO: 754 - protein, 1272 aa, Paenibacillus mucilaginosus
MFHRTKWLSIMLSVSLGLISCPVIQPAQAAAATIAEWKFDEGSGKTTKESVGNTSDPIHYVFNNAVYKPSGAPEWKADGISGSALLFDGYSTWVTHNPIATPSTAMTIETWVAPRAYEWGDNGMLSAIVNQHDKSAKQGFVLGVFRGGTWSLQIGSGGNWYELWAYEPLPKYEWSHLAATVDGTQGTMKLYLNGQQVASRSIPANSTITPSGNPLLIGKNNQSTPLAVFPLNMFNGLIDEVKIRSGAASAAEVQSSYQSYLTQLGGNLPTPDTGFNRSTYNGDKYRPTYHAIAPGHWMNEPHAPLYYNGQYHLFYQNNQHGPYWHNMHWGHWVSEDMVHWRDLPPALSPELFQVDPDGDWTGSSVIDDAGNPTLFFTAGNDAKPYIGSNQNIGVARSTVKQDGDNDLKKWIKESKLAVTQQPGQGKTGEFRDPYVFKDGSTWFMLVGTGIEGQGGTAAVYSTSDPKLMNWTYRGPLHQSNTAAYPHLGTVWELPVLLPLGNGKHLLAISPVGSGADVEVYYWIGTWNSGTAKFTPDQPAPQLMDFGDFKFTGPSAFVDPVSGRNILFTIAQGERSSQEESDAGWAHNAGLPVELSLRPDGRLGINPIAELKSLRGQQLVNITTDTSFAAANTALAAVSGDTLEIEVELARGAADQVGMKVRRSPNGEEETLLYYKNSTDEYGVNRTKTVAGTNKGIQKGTVDLGNENVKLHVYLDKSMVESYLNGLKSITTRTYSTREDAKGLQLWADTNTDSIVVKSLKVWSMNPAYVQTPASGVTLSPASLQVTEGGKKSLHATVAPSNATNKNVTWTSSNPGVATVVNGVVTGKSAGTATITAATRDGARTASSAVTVAAPASSANLTNGGFESGNLSGWIVESGTAFSDAAVSNQSVFWDTQPFNHKGTYHLWGFKQGEEATGVLKSSNFTLGGNGQISFLVGGGSDIDKLYVSFHRASDGKELFRSTGPGTYWNWQSSKGETESYTRRYWDATAYIGTSMYIKVVDERTDGWGHINVDDFLVPVQGGATDTQAPTAPANLQAPAKTANSVTLGWGASTDNVGVTGYTIFRNGTQVGTSTTTGYTDTGLSPNTAYAYTVKAFDAAGNGSAASSSLTVTTQASTIGGITNHDFESGNLTGWTVESGNAFSAADVTADVNWGWGGPFNQSGTHHLWGFKDGGDGQVGVLQSETFTLGGSGVIDFLIGGGNDINNLYVALVRASDGVELMKATGSNNEAYSRITWNAASYVGTPCYMKIVDNATGGFGHINVDDVNVPALK

SEQ ID NO: 755 - protein, 1600 aa, Catenovulum agarivorans
MNTSNILKLSLVALATSSLSGCILDNKATIDASDVKVISQPEPTPTPEPTPSPSPEEPVALTQMVYLNFDEQTGSSEAINQVNQAAYSVSNTFLKPERVLGVQGNALRTDGFSTWVTGNPDLANLSEMTIETWVALESYPSDHETGHANLSPASFISKMKDGKGFSLDINTFGQWQFNVSIDGTMYNLPAPEVFPLYSWNHVAAVVDGFNGSIKLYLNGVEVASTEANPIGGKIDNVDSSLLIAKSHATTSSGPFSVINGLNGAFDEVKIYQGSKLAEAFTANIQIKDDNHPLGTISLETPESRFIDDPNRPIFHAMPPANWANEPHGLVEFNGQYHMFYQRTPNGPFKTQMHWGHMMSDNFVNWTHMQDALWPEVEQGGTNGFDMKGIWSGDVVVEGDTAYAFYTNVNHTGPFNPGVAVATSTDADLQTWTKLGPIIDRTGVDDMRDPYLWKDGDTWHMIVGAIKSGHGALLHLSTSDISDINSWQSSSFMADFSVLTAPDGSKDGLASVLWEMPVFEKISDDKYMLLVNPVGNGYKPRGLYWIGSWSNGQFVPDDTQAKYLDLIVGHISPTVARNADGLLTAIGIVDERRSSEAQLAAGWTQTFSAPRVWSLAADGATIQQAPAAQLSDLRLNNSVREQSNLIVNGETLLEAKGRRVEIIAELDASDTANKYGVVIAASADGQEKTVIYYDAINKNIVLDKTKSTTSSSAFELTEQAGSYDESAFGKPEKFHIFVDGSVVDVFINDKAAFSFRIYPTKDDSNNIALYSQAADTRFTQIQVYQLADMQNKRTFIAAKADADGIVEGKEDGEIITVSVANNTFAQTLNIAGWQATNLPNGVSLGSINRIDDATAEITLSGNSSDDFDNNISNIELAVASDQFVSLPLPLEVKGLAPTITAEVEAVTSAELTIGGDTQANISEGSEAGQVISVALTNNTFVDPVDKAHWTAQNLPAGLDFTLTRVANNQVDIQLSGTAEGYQNQDQLVTFSIAPQAFSQVDPELFGQPAMSTSILFKANKIYNVNLPADGQNNSLVVGRFDGAQTTLAQGWSASGDFANPATEGAWRGTTINSASAQIGDGAVSTCEMNGNAKGCDQSTGRLTSPIFTLTKDNLYTLLAGGENNSKAVGIRVLDTAGNLLHNYSPASCGPANIDGDDDWTVIQASVLKGANIRAQFYDEESGACGFVSFDHLFQSDAAKDDSMIDGGTVTLTAEQSANLTYGVSLPYQDSDSNVIGSFDDAQAMITDGWVATGDFANPASADAWHSLTTARADAARVGNGGTTTCELNGNPCDASTGTLTSSLFDVSAEQSTLAMLISGGNAEMTNDVGIRVLDTTDAELARLNPGTCGDAYVKNDSHWKTIDLSAYVGQQVKVQVFDNEAGGCGFISVDHVHLTSGQAVDPNYVDFNFTATDYAEANPDQTLTNITVNADSFTQVIGSFDSPTAMLTDGWSATGDFANPVDDTAWAGTSSFNDAAKVGTNAVSTCELNNNANGCDQPVGTLTSPTFKIDAARPHLNFLMSGGNGSAPVGLRVINPANDAVITQFTPNSCADSRILGDQHWQTIDLTDYIGQFVQVVVFDEEQGGCGFVSFDHVHLSSSAK

SEQ ID NO: 756 - protein, 294 aa, Anaerolinea sp.
MGSSTLGAWWTFDEGQGSTTIEQVSGTADPIAYVFNNARYKPPADPMWRGGIRGHALLFDGYSTWVTHPLDAFVTPTRALTIAAWIAPRTFEAGIGGQLSAIVNQHDRLMQQGFILGTFTHGAWSLQIGTGNAWLEVWSHEQRLPRHAWAQIAATFDSDDGCLCLYLNGELVAAQSYESGRSLQPAAKDVLIGKHNTPVQVDVFEANCFDGLIDELKIDSVAWTAEQVKAVYRADRAAHGGIIPAADTRPRRSRYAGDLHRPQYHFIPPQHWMNEPHALLHFKGKYHITYQHNA

SEQ ID NO: 757 - protein, 963 aa, Streptomyces sp.
MRTRAPSRSATATRSGLLRLLLALAICLGLTSPLMTQPAGATGTTLTNPGFESGDLSGWATTGTAFNGAVTDKAGWGWGCCFNQQGSYHLWGFAAGGDAATGTVTSEPFTLTGTGMVSVLTSGGRNDNDLYVALTTLDGTVLHKATGTDDEAYRRVTWDVREHLGEQLRVTAVDKATGGWGHINLDDVRVGTDPAPDPSERGLAAHWDFSEGQGTTTREKVSQAADPISYVFNDAQYKPDSDPLWRPKNEADGVLAGALLFDGYSTWVTRAASQTQLPTDGLTVEAWVAPRAFEWGDDGKPSAAVNQQDKAAKRGFSLGVGRHGRWQFGIGTGDAWYEVTVPKPAALAAGKWAHLSAVFAPSEGAIRLFLNGEQVAQTAIPTTARLTKADVPLIIGRHNQPAIINGTFAVNMFNGLIDEAKIHNSALTPAAVTAGHQKDVRTFAGGATPKARMEMDRSRYDGDRYRPGYHFTAPNHWMNEPHAPIQYKGKYHLFYQHNSHGPYWHNISWGHAVSADLVHWRDLPVALAPTEDSVAPDGVWSGDAAYDENGVPVLLFTAGNDSQRPNQATGLARPVDPGDSDLVGWKMHPTLVTSQSADLNVGAGRRVRFGDFRDPFVWKEGDTWFQLMGSGVQSTSGTDIGGTALLYTSKNLTDWTYSGPLMVGDVAAHPKTGQVWELPTFLPIGKDAQGRERRALLVNPAFPAGPGEYSSKYVYYWVGTWDAQARRWTPDTTEPRLMDYGDHFTGPSGTVDDKGRSLVFSITQDRRTERAHYDAGWAHNAGLPIELSMRPDGDLGFRPVEEVSRLHTGEPLLDISEPTSLTDANTRLAGVKGDMLHIKLTMERGSADTFGLDVLRSPGDEERTRLFYDAPAGQLGVDRTRSGNNSSAEPNFGIHKGPLTLSNGTLTLDVFVDRSMVEAYANNHKSITTRAYPFRQDSLGLRLFGDGSVVKSMTVWKMGNMTD

SEQ ID NO: 758 - protein, 772 aa, Cellvibrio sp.
MKTFASQHRLQKHALLVSLIASLTLAGCKLGEVGPSPKSTNEPEQPPVATGSLVFHLAYDEPSGNTEEQVSDAAVVIQNQFNNAERVAGVNGNALRTDGFSTFLDANFSLANPKNLTVETWVALESYPSDRELPYDQHKPSALVSQFDGSKGFTLDINTWGEYSFRINVGGTLVTLKANERFPLNAWTHVAAVVDSVQGKVSLLLNGVLVASSNISKNQTLQLAERPLRVGKSHTDIVDGIFLLNGINGAFDDTRVYDYPLTSTALLATYQAGSSADSDAAIKTPASRFANDLQRPKFHAMPPAGWTNEPHGLVRNGNQLHMFYQRTPNGPFKTQSHWGHMVSEDFVNWTVLPDALYPTLDQGSTSGFDMKGIWAGDVVVSNGKAYAFYTNVNHSGDFNPGIALATSDTENFLTWEKQEPLIDSDQVQDFRDPYLWEENGTWHMLIGAKVQGKGGLAYYTSTNLLDWTYKPTFSSVSYANMDVGSEVWELPVFEPIGNGKHILVVNPVGGAVSKYDNNNPTRGLYWMGTWANGVFTPDYIQPKKLDLVRGHLSPTVERNEDGVLTAIGIVDERRGSQAQLDAGWAHTFSLAREWYLLPDNATLGQRPSEYLTSLRTAATPTSVANLSTADVTATGATGRQLEFVLTLDPNSTAERYGFEVLANADRSEYTRVYYDAIGKRIVLDKRNSTTTNEEDKTLLVENYDEAAFGKPTKFHVFIDGSVVDVFINDAAAFSFRSYPTKADSHGINLFAAQGTATFSALDYWSLKAIALQ

SEQ ID NO: 759 - protein, 1211 aa, GraciliBacillus sp.
MKATGTGTDTYSRVEWDASSHIDTTVRIKIVDNSTEGHINLDDVNVPPTPSLHDHIEPSIYNHDFEYTALPPDEIRGWEIVSGDAFGPDSLVHENEWSQGDTFHHEGDYHLWSFQDGGDASTGELHSETFTLDGSGGIDFLISGGEDEENLYVALVRESDGEELFKETGRNTEKYQRVFWDASEYIGEAVYIKIVDHATGDWGHINVDDFHVYNSVYDQNLIGYWNLDEGTGKVTTEQVSSIQNPVDYHLNEGVFQDSQDPLWKSDGISNSALLFDGYSTWVTHTPDKFPAPDNAITVEAWVAPRNFEHGDEGRLSAIVNQHDREEKEGFILGNFRHGTWGLKFGTGSDWYEVMSDTLLPLKEWSYIAATYDSASGEAVLYQNGEKVASRDFPAGQQIKPSVKDLLIGKNNDGMWLYGYDLNMFSGLIDEVKIYNQTLSATEIQNAYDSYLSNLNGNLPTPDMKMDRSILAKDKHRPQFHMSPPNHWGNEPGGPIYFNGQYHVFYQSNPRGPFWNHIRWGHLVSDDMVHWRDVDDAVIPGKHDVDPDGAWAGGAVVDDNDVPVIFYTAGDDRDFPNQRINIARSTYPEDGDNDLNRWEKSQVVILEQQKGEGIQGEFRDPFVFKDEDTWYMLVTSGKEDENGDPIGGTALVYSTKDSSFENWTYQGDLFVGDYDQYPKTGRVWELPILLPLGDSGKYIFLINPAKTSRQEYQSRYTYYWIGTWDPETASFTPDNEEPTLLDVGEHFTGPAGMVTPDGRTIIHSITQGRRPGNDDYDAGFAHNYGLPVEVSYRSDGQLGIQPIQELEQLRGDQLVDITSDTSFDDANQILSSVHGDMLEIELEIDNGSANEAGISLRRSPNGEEETTIYYKESSKEFWVNRLKSSLDPDVEKWYQGGNVDIGTDNIKLHIYVDRSEINAYINGLKGLTTRAYPTRDDATGLKLWANDHSDTISVKSLKIWEMNSAYTPVQAAGVSLNPSSMDLIEGDSEWLTATVTPSHVTNKEVIWTSDDPSIATVVNGKVTAHAEGTVTITAKTRDGGLTATNTIDVVPEPEHDELVNHDFETPDLSGWTILSGDAFTDLDVTSANDWGWGGPFNHHRNYHLYSIYEGDDSQVGEIRSQKFILGGNGQIDFLVSGGDDIYHLYVALVRDADGKELMKVTGGDQEGYTRVHWDASEYIGEKVYIKVVDQATGSWGHINIDDVNAPVHPTEK

SEQ ID NO: 760 - protein, 1070 aa, Unknown
  Description of Unknown: Planctomycetia bacterium sequence
MTRADPKDEAVSFNRDIRPILSDVCFQCHGPDAKERKADLRIDNDEQLFAEREGHRVLVAGDPAKSELFRRLISTDDDERMPPPKSGKKLSTSQIATVRRWIEQGAKTQGHWAFLAPTRPRVPQSSNLKSEIRSPIDRFVLARLEREGLSPTSVASRATLLRRVTLDLTGLPPSMDEIEVFLSDDSPDAFERVVDRLLASPRFGERFARPWLDAARYADTSGYQSDGERSMWRWRDWVIDAFNDNKPFDEFTVEQLAGDLLPKATPDQILATGFNRNHRGNAEGGIIPEEYAVEYVVDRVDTTATVWLGLTLGCSRCHDHKFDPFSQREYYELFAFFNNVPERGRAVKFGNSPPFVKTPTREQQQQLQSKQFQRGFAEGFLEQAFESTKSAQTEWERQVSKSREKVPDRTVTRGESLHLSLDRDGVPSPQRVDPEKKDRVQPTPLGPTSGAPVVKDADRASIVLGAGRLGQAAMFDGQRRLAIGDVANIGFFEPFSMSAWIRAESASGTILSRMTDDPNSDGYNLCLDNGKLQLNLIKRWLDDALRVETEQAIPLDRWVHVGVSYDGSRFADGVRFFVDGKPAKLHVVLDELNQAFASKDVFRIGYGGLTPPFRGAINDVRLFDVRLTDDEVAILSVPETISQIAALPTSERSPAQARKLREGFLAEHSPPAIRKAHRELQRLRFEEQQLVDSFPTTMVMQELPEPRPAHVLLRGAYDRPGERVSPAMPKAVPVGLHPSKSTNRVDLARWLVDPANPLTARVTVNRLWQQLFGQGLVKTVDDFGSQGDWPTHPELLDWLAVEFADPADSRQQTADRRDPVFQRWDIKRLIRKLVTSATYRQSSQTSAEMLTRDPDNRLLARGPRSRLSAEMVRDQALAASGLLTEQLGGPSIKPYQPEGLWDDLQSTEKYVQDHGSALYRRGLYVFWKRTIAPPVMVTFDAAGRETCIVRETRTNTPLQALTLLNEVSFVEAARKLAERTLTSGSTDVDRRLRFAFRAVLTRDPTARELAVLKRGVERHLTHYRQHRDEAITVLQTGESVVDASLDPVEVAAWTAACGLILNLDEAVTKE

SEQ ID NO: 761 - protein, 1121 aa, Unknown
  Description of Unknown: Bacteroidetes bacterium sequence
MLSMFKRYDCKFFSVSAFLVFFILNTAYSKKIDFNRQIKPILSDRCFKCHGPDKSKVDAELQLTSFEAATALLPSGKRAIVPFNTKESELVRRIMSDDPHEVMPSPKSNLQLTAEEKKILVQWIAEGAEYQEHWAFISPFKYPSPLVINKAWSKTTIDDYILQKLEEKGLKPNIEATKEVIIRRLSLDLIGLPPTVEEVQNFINDTSPTAYEKLVDRLLSSPHFGERMALEWLDVARYADSHGYQDDGMRNTYPYRDWVIRAFNQNLSYDKFTVWQLAGDLLPNPTIDQLIATCFNRNHQQSQEGGVVPEEYRVEYVSDRVATFGKAFLGLSTECAKCHTHKYDPIEDKDYYALYAFFNQNNESGIVPYNGEASPTVLLPTPAAQKSLDSLRALMEPHITATKMTDQYKNDLEKWLTKINASNISSLKEPVGRVLYLDFEKIDTTLIGDMITPPTKAELERRAKELERSKTDSTIKIKPPGKFSGFLNMEKVDSTVKAVRFSGDRDKYPFLVTGKKGRGISFRGEASIEAGKALSYDRFQPFSVSIWVKLNKHGEEGPIFNKANSEEEGFRGWACKLNKNGTLSFQFAHVLPDNAIDFVTIDTLKVGEWTHIALTYDGSSKASGIRFWLNGKIPEYKLLVDNLQKSMVFARFNVIRGTRNFTLGSNSPRTLQNMDMDELAIYKRALSEIEVLDLYDASQDIIPQLISKKSRSEEENKQLLSYFLLRGYQSDVKRSQDSLLSLRSQENYIATNEEEVMIMTDRAEYRKTFILDRGAYDAPTKIEVTPNTIPKIFPFDEAKYPKNRLGLAQWLLDEKNPLFARVAVNRFWQMLFGKGLVLTQEDFGNQGSFPTHPELLDYLALNFREKNWDVKAFLKEIVLSATYRQSSYPSELAKEVDFANDLYSRYPAHRLPAELVRDNALAASGLLVPQIGGPSVHPYQPEGLWEALATRNATKYIQDHGDSLYRRSLYTIWKRSSPPPSMLNFDATDRSYCAVRRQKTASPLQALVLMNDPQFVEAARILAEKMQRIPNTTGNNMSESDRLVYGFQALTSRKPRKEELSILTELYENQWAYFKENKEKAIDLLTVGEYQRDEKLDPVVTAAYTIVASTIMNFDEFAVIR

SEQ ID NO: 762 - protein, 1139 aa, Unknown
  Description of Unknown: Planctomycetes bacterium sequence
MRSWRNDPPGSKGAALREASPTPNSHGKRRRPGERTRRRSRLPQVFAAIRLLQVLLALVIVLAGDAPSACRAAPDFDRDIRPILSDKCFHCHGPDAETREADLRLDVRDSALGRAIVPGKPDDGELIARIASTDESSRMPPVETGLSLTDREKQLLRDWIAAGAEYAEHWSFRPLRRAAEVPAVGDPSWPRQPFDWFILARLEAEGLQPAPRADALRLLRRMALDLTGLPPTVAEIEAFEAAFKEDADAALAAAADRLLASDAFGEHLAVAWLDAARYADSFGYQSDQLNTQWPYRDWVVRAFNQNLPYDEFLTWQLAGDLLPGATRDQVLATAFNRMHRLTNEGGSIAEEWLAENAADRVQTFGAAMLGLTLECARCHDHKYDPILTRDYYSLTAFFNSIAESGMYDHSAKVPPPSLLLPTAEQEARLAAAREEVAAAEAAVAKARAGGQSRFAAWRESPPAAELADLVAHYTFDGELSPLRNEAPGATTSGDAAGLAQVAGVPGLPSRGRPGGRDSFATGDPASNANSPVAKDSRTLPDSLNSNMALRFDGDHGASFPALLEIDRFDPFTIDFWLRDHAASPLPVVVAHRTFGTDVGPNGFDLMLAGGVLQARLYRVWPGNAIGVEAAEPLAAGQWTYVAVSYDGSSRATGFRLYIDGRPLALRVLRDHIYKRAAVATYGEGSFTLGQRFRDRGFKDGEIDDFRAFSRALTPLEVRRLHDATAGDSQPEQPSAPLSDDALFETYLSAVDQPYRQALAQLQAAGKMLLAVEEEIQEVSVMQDDAEPRPTYVLARGAYDAPKTDANRVLRDVFQQVLPPFPADAPRNRLGLAGWLTAPQHPLTARVAVNRLWANFFGRGLVATPENFGRQGAAPTHPELLDWLARDFIDHGWDVKRLCRRIVLSATYQQDSRAPAELRDRDPDNALLARGPSRRLSAEQIRDLALAASGLLHREIGGPPVSPYQPGGDLWREANSMSPPYKQSAGTALHRRSLYSVWKRTAPLPNMMVFDATTREVCTMARSRTSTPLQALVLLNDVQFVEAAEALAAAAGSTHGDEAKRIEHCFLALTARRPTRNELTLLTDLYGDQRQRFAGGEQAPAELLALGQATIESSLRPADLAALTVVCQAILNLDATIHLR

SEQ ID NO: 763 - protein, 1038 aa, Unknown
  Description of Unknown: Verrucomicrobia bacterium sequence
MYGLIPVPLRKLLLPFPLLLAGALGAADPVDFNREVRPILSDRCFGCHGPDADKGRKAGLRLDEFEGATKALKSGERAIVPGDLTKSAIIARINAKAEDDIMPPPELHRPLTASEKDILTRWIKQGAKYDRHWGFVTPQAYPLPKVVDAAWPKDPLDHFVAAKAAQVGLKPSAPADRVTLLRRASLALTGLPPTTAEVDAFLADKSPNAYEKRVDALLASPRFGEHLAVSWLDLSRYADTWGYTGDNGMFAWPWRDWVLQALNDNKPYDQFLTEQLAGDLRPNPTQDQRVATAFNRLHRMTFEGGSIAEEFRQDGINDRVSTASYSFMGLTMECARCHDHKYDPISQKDYYSMAALFGDQNENGLLSYHGEVPPPFVRLFKSDAERTKEQHLKAAIVAAEKALAAIPTPSLANLGATAPAAPIVHLPLDVFTITGADNAIANGKPAKFERRSDPDDLQLTPGVKGQGVKFDGDAGFILPDFRQLGRFEPFTFSAFIRFGEKNTRATVLHSTGFYTGDGDATGVELLVTEGKLRWSMIHLWPNSAVSIITKTELPLNAWHRLTATYDGSSQASGLHLYLDGREIATTVVRDTLHAKSRNNALEIGSRTRDAGFRNGSLDEVQLWNQALTAVEVASLHGLDPSTLPKALQQMHARERTDTAYQEAWKKLQQARRDLAAHQESVPAFFAMEHSPLAPKAYVLTRGEYDKPDLTKPCEPGVPTRIFPWDDKLPRNRLGLARWLTDPKNPLTARVAVNRLWAHVFGNGLVASSENLGLQGDQATHPELLDTLAVDFVRGGWNTKAMLRRLVLSATFQQASTPSAAAREKDPANLWLARGPVLRLTAEMVRDQALLASGKLVEKVGGASVQENAHRRSVYTFRKRTSPPDNMLIFDAGSREVCQPKRLNTNTPLQALVLLNNPGFVESAQLIALRVSKEATDPKDQITLAFRHICTRSPRPTELTALVELYTQQKAQLAQLTPVAPVEPVATEPKPDPKAKAEPKGKRAATPAKAAAISADPALAALTLVCSTILASDAAVTSR

SEQ ID NO: 764 - protein, 1040 aa, Cyclobacterium sp.
MEELPEQVDFNIHVKPILSDNCFSCHGPDEAAREAGMRLDLPDAAYAATKESGKIPISPGKLNQSEVFHRIISEDPDFQMPTPESHLTLTNRQKAILIKWIESGANYQPHWAFISPKMPVLPEAKIRDWSTAPIDLFIGKKLVEHGFEPSPSASKELLLRRLSLDVTGLPPSLEELDAFLADDSENAYEKQVDRLLGSPHYGEQMAMFWMDLSRFADTHGYTVDRFRDMSPWRDWVIEAYNQNMPYDQFIIEQLAGDQLPNPTKKQKLATAFNRIHPQNMEGGIVQEEFRVQYVADRTNTLGKAFMALSLECARCHDHKFDPVSQKEYFQLSSFFNQVDEAGQISWDNAMPVPTMLWTDDKKDELLKLLKNDISTAEVTLDNIKIVEEADFEAWISSEGYKNIRFYKPTKSLIAHFDFNKVPLRDRINPTVKGVMESTGEASKQAELVDGYQGKAASLNGDAWLKMGGVGSFSKDQPFSVGIWVNIPANLENGVIFHTGNGAVLFNRRGYHLYLRDNRLEMILAHTAPYNVISNHTLEDIPRDEWVHLLMTYDGSSKAKGIKTYSNGKLMASKMSRDNLYKDILFDGDKQPGIQVGAVWRGRGLKGAAVDELTIFNKELTSLEILEWLQPELLAKVVKKSAKDLSGEERKTLEVFYWNNLSPKYQNQLKKLEAARREHSVAVEPVQEVMVMDDMDPGRTTYILERGEYAAHGEEVDKNTPVSILPMPEDYPKNRLGLARWLVNDEHPLTARVAVNRLWQQFFGRGLVATSSDFGNQGEMPSHPELLDWLAVTFRASGWDVKMMQKMMLMSATYRQSSLTGKELKEKDGDNIWLARGPSGRMPGEMIRDNALYASNMLGKALGGPSVKPYQPDGLWSVNGGQYVEDTGENLFRRSLYTLWKRSVPNPTLHIFDAPERSEATIKRQETNTPLQALVLMNDPIYVEIAKVMGMQIATEQDTSKAIQDAFRKLTGRFPKENELALLLKLREVELKKFKEAPEKMDGWLNKGAYPIKEKPDRYQWAANTVVASAILNADATITKR

SEQ ID NO: 765 - protein, 757 aa, Paenibacillus polymyxa
MSHATDNRGLIMYWAFNEGTGTSALESVSQVQDNIQYVFNQAEFTKPCPPRWRQGVIGNGLLFDGYSTYIAHSFDEGNQNTEPEYRSALSIGVWVAPRSYEWGDDGKLSAIVNRYNLDRKQGYLLGMFRHGSWSFQVGLEGGDWKELWSPDGHELPKNEWSYVNAVFDGNQGEIKLYLNGSEIASAALPCGSRLAEATDSELLIGKNNHSSLLAEVFSLHMLSGIIDELKIYNRALSAEEVAASYRHVLDTFHEGVRPQLNYDEIKLDRTPLLLDRHRPQYHVSPPAHWMNEPHASIYFDGQYHLFYQHNPHGPFFHQIHWGHWVSQDLVHWRDLPVALAPEKDQLAPDGIWSGSATYDADGLPVLFFTAGNDSASPNQSVALARSTYTLDGNPDLVHWVKHPEPLIVQKKGMGAFGDFRDPFVWKDDDGWYALVGSGIEGGAALAFASQDMLNWTYKGPFFKADIQKFPYLGPIWELPVLLPLGSDKQGVNKHLLLVSPVGKGADVEVFYWIGQLDKQNLSFIPDQEEPQLIDVGDFHFTGPSGMVDPKTGRNIVFTIAQGDRTSEMEYKSGWAHNGGLPLSVYLRDDGRLGIEPIQELQSLRSAKRLSLRDQSLAETNVRLRDVHGDMLEIQLELEPGSAKQFGIKVRCTPDGEEETLLYYDWNQAMLMVDRSKTTLHPGEKCGGIQGGKLELLGENLKLRIYLDRSMVETYANGLKSLTTRVYPSRMDALGLEIWGDGEPFVKSLEIWDMQSIW

SEQ ID NO: 766 - protein, 1113 aa, Micromonosporaceae sp.
MSRISADRSPARWLAAVALIMLLLVQLMPLPGQRVAVASASDIVNPDFESGDLTGWTATGNAFTNGVTSQTGWGWGCCFGHHGTYHLWGFATGGDAATGTLTSTMFQLAGTGQVSFLLGGGNDLGNLYVALARASDGAILFRATGRNEETYHRVTWDASVHLGQDLYLRAVDNSTGGWGHLNLDDVRVYDEPAASDIVNPDFETGNLTGWTATGSAFTNGVTSQTGWGWGCCFGHHGTYHLWGFASSGDSATGTLTSSTFRLGGTGQVSFLLGGGNDLGNLYVALVRASDGAILFRATGRNEETYHRVTWDASVHVGQNLYLRAVDNAGGGWGHLNLDDVRVYQQPPVSGLIAHWPFSEGSGTVVRDTVSGIQDPITYVFTEAKYKPSSPPLWRSGPSGHGVLADALLFDGYSTWVTRPASQLSTPTQALTVEAWVAPRAFEWGDEGKLSAIVDQHDEGARQGFILGVGRHGRWSFQAGIGGTWNTVWSSPDKSLQRDRWHHVAATFDSVSHTIRLYLDGALAGEGSTAVGELTRYPGNMLIGKHHQGVVINGTFSVNMFAGLIDEVKLRSNALSGNDIANVYQAAVSTFANGVVPTPDLGMRRSRYDGDIYRPQYHFLAPEHWMNEPHAPIYVGGQYHLFYQHNQHGPYWHNISWGHAISPDLVRWRDAPVALVPTADSVAPDGIWSGGSTLDASGNPLLFLTAGDDSVFPNQRTGVARCPGWPSDNNLNAWAMDQAPVTVQSATLDVGAGRKVRYGDFRDPYVWREGDTWFQLVGSGVQTTGGADVGGTALLYTSTDLTNWIYAGPLMVGDMNAYPKTGQVWELPVFLPLGVNAQGVRKHILLTNPAWGSPSEHNVKYVWYWIGTWDAIQRRFIPDSAVPRLFDYGEHFTGPSGFVDPQGRSVVFSIAQDKRTERAHFDAGWAHNAGLPIVLSLQPDGDIAVQPLPELTTLHHTTAPILSITGDTSLATANQQLASISGDMLHLTLELAAGSSSRFGIKLRRSPGGEEETLVYYDVATQTLNVDRTKSGTNSSLFTNLGVQGGSLPLAGQNLKLDIYLDKSMIEIYANGSRSITTRAYPFRADSLGLQLWADGSATVKAARIWEMTSAHQQ

SEQ ID NO: 767 - protein, 1256 aa, Paenibacillus riograndensis
MMPYGIYTPKAEAAAAKIAEWNFNEGSGKTTKENISNSNDSINYVFNNAVYKPSSDPVWRNDGISDKALLFDGYSNWVTHPPITTPSQSMTIEAWVAPRAYEWGDNGTLSAIVNQHDKSGKQGFVLGMFRHGTWSFQVGSGGQWYEVWSYEPIPRNEWSHLIATVDGAAGTMKLFLNGRQVAKSSIPSNTTITPSGNQLLIGKNNQSTQLGVFPLNMFNGLIDEVKIYNGAYTNAEAENSYQSYMLGLGGNLPTPNLSFDRSVYDGDRFRPTYHAIAPGHWMNEPHAPLYYNGQYHLFYQNNQHGPYWHNMQWGHWISEDMVHWRDVQPALSPELFQVDPDGDWTGSAVIDDSGNPTLLFTAGNDSRAYLNSNQNVGVARSTVQTDGDNDLKKWVKEPKLAVAQQYGKFNEFRDPYVFKEGSNWYMLVGTGYEGQGGSAAVYSTADPNLMNWTYRGPLYQANPSTYPELGGVWELPVMMPLGSGKHLLAISPVGSGANVEVYYWIGTWNAGTAKFTPDDPKPQLMDFGDFHFTGPSGFNDPKTGRNIMFTIAQGERNSQEESDAGWAHNAGLPVELSLRPDGKLGINPISELKSLRGQQLVNITTDTSVAAANTALSSVQSDTVEIEMEVSRGSADSVGIKIRKSPNSEEETLIYYKNSTKEYGVDRTRTIAGQNKGIQKGTIDIGSENVKLHVYLDKSMAESYLNGLKSITTRTYSSRTDAKGLQLWGDANTGSIVVKSLKVWEMNSAYTPVAVSGVSLSPASLQVAVGGKKTLNADVAPANATNKNVIWSSSNTSVASVVNGVVTGKSAGSATITAQTRDGAKAASSTVTIVAAPAANIANNGFESGNLDGWIIESGTAFSNSGVTNAATFGNNQPYNHAGNYHLLGELSGGNAATGVLKSNEFTLGGNGQVSFLIGGGSDIDKLYVSFVRASDGKELFRSSGPGSYWNWPSTKGVTEGYTKRSWDATQYIGTPMYIKIVDERTDDWGHINVDDFIVPIQGGTVDAEAPAAPKNLAATGITPSSVTLGWTASTDNVGVTGYLIYRGGVQVATSTTTTYTDSGLTAETAYTYTVKAKDAAGNISAASNSVTATTQAAQVIGSLTNHDFESGNLSGWTIVSGNAFSDADVVADTNWGWGGPFNQSGAYHLWGFKDGGDSQTGVLKSAEFTLGGSGAIDFLVGGGNDINHLYVALVRASDGTELMKATGSNDEAYSRVTWNAASYVGTTCYIKIVDNATGGFGHINVDDVNVPVLAD

SEQ ID NO: 768 - protein, 1348 aa, PaeniBacillus sp.
MKWLQLRVLFFTMVIFTSSIVINSPVSKAVSSVVAQWSFNEGTGNVTKELISQISDPIHYFKPAPAIPEWKTDGISSSALLFDGYSTWVSHPAISIPQSKISVETWVAPRAYTWGDDFKLDAIVNQQSKSANQGFLLGMYRYGTWSFQFGSNGTWYDVWSYEPLPKFEWSHIVATYDSAYDNTGGLAVLYLNGKQVASKRTPLNTLITSSANNLLIGTNNESTYGASPSLFPYHTFNGLIDELKIYNGALTATEVQNSYNSQLTNLDGNLPTPNLSFDRSVYNGDNYRPTYHAIAPQHWMNEPHAPLFFNGQYHMFYQFNQQGPYWHNMHWGHWVSTDMVHWRDLPPALAPSLFQVDPDGDWTGGSVIDDSGNPALFFTAGNDAKAPNNENVGLARSTYPTDQDNDLKRWDKDASLAVTQQAGQGIQGEFRDPFVFKDGSTWNMLVGSGISGQGGTALVYTSSDMTNWQYKGPLYQNNLYPAELGNVWELPVLLPIKDSLGRQKYIFMVSPIGGQVRVYYWIGTWNNVTSQFTPDPGSDAPQLMDYGGFHFTGPSGFVDKSTSAYNTPNRTILNTIAQGNRNSQADSDAGWAHNAGLPVALDLRLDGQLGINPISELQSLRGTQLVDITTDTSFTDANQILSRLQGDTLEIDMELSPGTADKVGMYVRKSPTSGEKTLLYYKKSTKEYGVDRTNTIAGQPQGIDSGTIDLAGDDTVKLHIFLDKSMVESYLNGLKSITTRTYSTSNDALGLQLFGDVNPDTITVKHLQIWNMNSAYTPVPVTGVSLNTESSQVFTGGKQTLYATVAPSNATNKDIVWTSSNSAVATVTNGSVSGNSVGTAIITAKTRDGGFLATSTVTVVAPPASTPLTNGNFEAGNLSNWTVVSGNEFTDHAVVTKSPTWWGVQPFNQQGAFHLWGSNGAEGDSPIGELRSQTFTLGGNGQINFLVGGGIDIDNLYVAFVRSSDGKELYRTSGPGTYKDWADHKGDTEQYTRRYWDATPYIGTSMYIRVVDNRSDSWGHINVDDFNIPIQATEQLPNYNFEAGNLSGWIVESGNAFTDADVSSASTFWSPPQSFNKEGDYHFWGFNNGGDDRVGAMRSVSFVLGGNGLINLRVGGGQDINNLYVALVRASDNAILFKETGLNNEGYTVSNWDASAYIGTRCYIRVVDNSTGGFGHINLDAVNVPVQAGSMIGQLANHDFELGNLSGWNVTSGNAFTDSDVSSASTFWNPPQSFNKQGTYHYWGFNNGGDGRVGSMQSTNFVLGGDGQIDLLVGGGQDLNNLYVALVRASDNAILFKETGLNNEAYTRKNWNASTYIGTTCYIKMVDNTMGGFGHINIDDVNVPIRIP

SEQ ID NO: 769 - protein, 219 aa, Paenibacillus sabinae
MLATVTPANATNKDVIWTSSNPAVATVVNGNISAKSVGTATITAKTRIGGFTATTAVTVTAEPAHGELANHDFEDGLNGWTILSGDAFTAQDVTTANDWGWGGPFNQNGAKHLWGAQSGNDSQTGAMRSEQFVLGGNGQINLLVGGGNNYYDLYVALVRASDGKELFKATGLDQESYTRIYWDASDYIGTECYIKIVDNATGSWGHINIDDVNVPTVAP

SEQ ID NO: 770 - protein, 171 aa, Unknown
  Description of Unknown: Firmicutes bacterium sequence
  MOD_RES (160)..(161): Any amino acid
MKKSIIVLSFISSILFSCGEINQSLVDDGKLLHFSFDEIDNEYTKEEKSQESYHVNYVFNQDNKDKIFKEPSQALLKEGVKGKSLYMDGFSTYVSDDDFISPKTAITFSSWIAPRVFENVFNYGDDTVCKGHTRLTSIFNQGDMEMNEGFTFGYGRLGLXXRIMGYAIKFT

SEQ ID NO: 771 - protein, 739 aa, Microbulbifer sp.
MGMPVLHRLFGFLFLAFPAPLLVAAEEPPAYRQDFERLDTEALAPLRIHTQFSAPDSVPGVAGKAWRSDGFSSWAELPYETGEKFSLTVWLALESYPSDLEVPVSELSPSAIVHQWDGRGGFNIHVDTFGRWGARLQTESGETDLVVETPFPLYRWVQLALSVNEREAALYLDGEMVAREVLPAPLRPADAPIRLARAVDEAEILNFTVNRLNGVFDELRLYRRGLPAAEIQAIRRRYPDTVPVEPSLAVPESRFAGDHLRPRLHAMPPANWTNEPHGLVKVGDLWHLFYQRTPNGPYKTQMHWGHMVSRDLLRWENLPDALWPELQDDEFGFDMKGIWSGDVIYEGGRAFAYYTSVNHGDRLGAANPGVSMAVSEDPELRHWRKLGPIINTRYVRDFRDPYLFKDGDTWHMLIGAAQKDGGGLDYYILEKEENKWRHRRRFSSIPFHKMDIGSEIWEMPVFEPISVDAHVLVVNPIGGRISKYGEPATRAVYWVGRWRNGLFHPYESEPKNLDLLPGHLAPAVERGEDGSLRAIGIVDERRSPQAQEDAGWAHTFSFPRRWRLLEDGRTLGQSPAPELVRLRGEPLDTPPVPALLEKPLWLAEPDGAYELVLESSGAGGLAIGVDLLVSSAGGEYTRLMFDGESDTVILDKRNSWHGGGGEGPDLLQAAYDSAAFGEIRELRVFVDGSVVEVFVNDSAAFSFRSYPEDPGARGLRIFPLRKKAVLAGATLWPLRIPAE

SEQ ID NO: 772 - protein, 373 aa, Paenibacillus riograndensis
GCGSLTNHDFESGNLSGWTIVSGNAFRCWDCVADTTWGWGGPFNQSGAYHLWGFKDGGDSQVGVLKSAEFTLGGSGAIDFLIGGGNDINHLYVALVRASDGTELMKATGSSNEAYSRITWNAASYVGTTCYIKIVDNATGGFGHINVDDVNVPVQDGAVDTESPATPKNLAATGITPSSVTLGWTASTDNVGVTGYRIYRGGVQVATSTTATYTDSGLTAGTAYTYTVKAKDAAGNISAASNSVTATTQAAQEIGSLANHDFESGNLSGWTIVSGNAFSDADVVADTNWGWGGPFNQSGAYHLWGFKDGGDSQAGVLKSAEFTLGGSGASDFLVGGGNDINHLYVALVRASDGTELMKATGNSNEAYSRITWD

SEQ ID NO: 773 - protein, 1047 aa, Unknown
  Description of Unknown: Fimbriimonas ginsengisoli sequence
MRTQGGVSGFLLMLVSASMLAGAALWPAQKPAAKEKLSYSRDVLPILSDKCFKCHGPDAGSRMAGMRLDTPEGAFANRGGRFPIVPWKPNDSLVVKRINHPTMTMPPPSSGKSLTKEEIAILTRWIAEGATYGRLWSFQPVPANVAVPHVKSTWPRGDLDRFILARLKKEGLAPSPPADRLRWLRRVSLDLTGLPPTEREIAEFQSDKSPAAFEKVVDRLLASPHFGERIAVDWLDAARYSDSYGYQSDLLMPTWPYRDWVVKSFNQNLPYDQFLTDQIAGDLLKNPTRDQRLATAFNRLHRQSNEGGSIALEFKTEYAADRVNTYGTAVLGLTVGCARCHDHKFDPITQKEYYQLFGYFNSIDEYGLLLSTEIVPTPSLLLPTAEQERKLNELKSADRQVQLNLAKATKDAEQRYRQWTGKPPETPQLLARFSLDGDDGGKFANDLGGNLTGAKIQNVDLVPGHRGKAVLFDGDNGVLFRGLPGRERWDAFTWSFWIQDPRPGKGPVVLMHRTGGTDVGFCGFELMLEDGYLTARVMRHAPGNAIVVRTKAQVPKGKWSQVAWSWDGSGRAAGLKIYLDGRPAETTVLNDQLWKKINAYGDLGPSGGEWSFAQRFRDSGFKGGKLDDVAFADRELSAFEVAQLYGNAAPSDLPGYYIAAVDPEVRAAQEAVRKAQEQLANAEEAVYEISVMEEAKKPIPSYLLARGRYDAPRTAATLVNRGVPKSLPPLKVAGKNDRLALAKWSTRSDNPLTARVAVNRLWQMIFGVGLVETSENFGSQGSRPTHPELLDYLARRFVNSGWDVKALLRTMVLSATYRQDSKLTAKLAKVDPENRLLARGPSHRLSAEMVRDTALAAAGLLNPRVGGPPVNPYQPAGIWQENNTMSPGFVQSKGADLYRRSLYSTWKRTTPVPSMLLFDATSREACAIRRPTTSTPLQALVLLNDVQFVEAARALADHALVASADTGERIRLIFRRLAGRNPDAREMAVLTQGHEEQLSQFKSTPADADKLVHVGESKPTTIDPVVLAAMTVTVQTVLNSDAVVWKR

SEQ ID NO: 774 - protein, 812 aa, Arthrobacter sp.
MTTATRKVVPMTELRQTQPTTNLPGLGRRTFLQGAAVSAAVIATGALFRPAAAATGDPVLRLTYDQPNGSTTVLDEVGRSNFTVHVSNNPAERVPGVRGNAFRTDGFSTWATGQFATPLTTQMTIQTWIALESYPSDSEQPYDALTPSSIIYQRTNDAGFDIAINTYGEWWFTAHVGGQWRTVKAPWLFPLYEWVQIAAVVDGDAGQLRLHLDDAAGPKVASVAIPTGSRFTQAAGAPLVVGKASKDVTTGVFLINALNAAYDDTRIYDIARGAAALTGEYTSGIAGASPAHDVALQVTGLRFADDILRPRYHAMPPANWTNEPHGLVRHDCSYHMFYQRTPNGPFKWQMNWGHMTSTDLVHWTNMPDALRPELNDREARLGAVAGSGLSGQGSKGIWSGDVVSVDGTAHAFFTTVNFGGPFDPGITRASSTDPDLLTWTKASTGVIDKNAPAHVADFRDPYLWQEGGTWHMIIGAATDAGGALEHYTTQDIQGQWTRASRPFSTVSFASMDIGSAIWEMPVFEKIGTHAGRDKYVLVVSPIGRSVSKLSEPYTRSVYWTGTWNGSQFTPDYARPKSLDLIHGHLSPTVAHGPDGKLVAIGIVDERSSSKMQLDLGWAHTFSAPREWRLLEDGQTLGQRPIAQLMTLRAGSAQTATNVAVTGEHNLAAAGNQVEILAKVDPASTGARYGLCIGASPDGSEITRIYYDGNDIVIDKTRSSRNFENEEAVLLRGAYDEAVFGKPHTFHVFVDHSVIDVFINDAAAFSNRIYPTSRGADGAAASTGLRLYSEGGQTRFTQTDVWQLQSAWPTPAF

SEQ ID NO: 775 - protein, 776 aa, Pseudomonas mucidolens
MHNTEDTGLIAYWSFDEESGKTAVDVIGKMNDSIDYVFNHARFKASSDPQRRKGISGNALLFDGYSTWIKRSADQIGKPENALTLEAWVAPRSYEWGDEQRLSAIVNQHDREKKEGFILGMYRHGTWSLQLGLDHEWIEVWSEDHPLPKNEWSYVVATYDKKTSMLKLACPSMLKLYLNGVEVASKQTTAHSTITPSRQDLLIGKNNQAVVLAGVFSLNMFNGLIDEIKIYNRALSSDEIASSFHRYLVPYGGKIPSIPYDHLKLDRSLLADDRHRPQYHVSPPAHWMNEPHAPIYFNGQYHLFYQHNPQGPYWHQIHWGHWVSDDLVHWRDLPVALSPEKNAVDPDGDWSGSATYDEHGLPVLFFTAGDDSAKPNQRVGLARSTFAQDGDNDLVHWVKHPTPVVVQQQGVGKFGDFRDPFVWKDGDTWYMLVGSGTDGEGGTALAYTSKNLTEWEYRGPFYISDHKNYPYLGKVWELPVLLPLGKDKKGHDKHVFLISPVGAGADVEVFYWIGTFDKEQFRFIPDQNEPQLIDVGDSHFTGPSGMVDPNTGRKILFTIAQGERTPALDYSAGWAHNGGLPVSLSLREDGRLGVEPIEELKSLRGKKLVSFTKKSAEEANDLLTNVKGDMLEIILELEPGTAKQFGIKVRRSPGGEEETLLYYNTEASTLNVNRMKTTLDNFERSKGIQGGKLELNGENLKLHIYLDRSMIEAYANGLKSLTTRAYPSRPDSLGLQIWGDGSVSVKSMEVWEMNSAFGPTVSAYIPEQHADGVQTK

SEQ ID NO: 776 - protein, 304 aa, Talaromyces sp.
MFGDYLPVAIPVKNRIKSFTSTSYYDDNNTTGLGTSTNPPYLVVFHWVYLFKRNIGSLKFPSNPIISVALEAPHDVTGGLESYDSKMSLDAKSWIWIKGFPSSITRWEVLDIFQLPIQGTNETTWVVIFTPAQGSPAGGNGVVALTGSFDRERFVANPIDSSTLWLDYRRDFNGAMSWENIFGLLFALIQVPLSLAVRKGGSKQTVIRYSQSNSTLSVDQAASGDISYDPAAGGVHSAQLAQDNTELVHIWVLIDTCSVEVFGGQGKALISDLIFPSNSSDGLSLEVFGGTATLQSVEVSSVSL

SEQ ID NO: 777 - protein, 480 aa, Microbacterium hydrocarbonoxydans
MTDAPAPRPLLHFAPERNWINDPNGLVFHKGRYHLYYQCNPDGVIHDHLSWGHASSTDLVEWDHHPVAIRNDEAGEIYSGSAVVDRGNTSGLGSADAPALVALYTQASKHPNHQAQALAHSVDDGLTWTKYAGNPVLDRGTGEFRDPKVFRYEGPAGSYWVMVAVEATDRQVLLHRSDDLTRWTFLSSFGPERAVDGVWECPDLFPLAVDGDPSDVRWVLLISLNPGGIAGGSGTQYVIGRFDGVTFTADADATGEAIDWLDFGRDCYAGVTFDGLAREDRTLIAWMSNWDYARYLPFTEGTLQHGMMALPRRLSLVRVDGRLRLRQQPITASPGEEQVTQGVLVDAPRAIGELPDAGRITVRIDTQEASGFRLRLNGDSPEGGGVVLAYDRGARRLTLDRRHGADGIHESFGSVESMPVSGGHVIELVIWIDRASVEVFADGGTRVLTDLIAPQQGRVLAVEGIGGEVRVDRIAVAPAG

SEQ ID NO: 778 - protein, 516 aa, Unknown
  Description of Unknown: Pseudarthrobacter siccitolerans sequence
MTFPTTAAAPAAVAVPDALAVPVIDPFRPEFHYTAERNWLNDPNGLVYLNGTYHLFYQHNPFGPDWGNMSWGHATSRDLLHWDEQPVAIPCDGSEAIFSGSAVFDEHNTSGLGTAATPPLVAIYTSAYSAASPLAGRQAQSLAYSLDEGRTWTKYQGNPVLDRASADFRDPKVFWYDGGAGSYWVMVAVEAVQRQVVLYKSADLVAWEHLSTFGPANATGGVWECPDLFELPVDGDPEDTKWVLIVNLNPGGVAGGSAGQYFLGGFDGVTFRSESTVTEGLQQDGSRMRDYGWLDWGRDYYATVSFSNAPDGRRIMIGWMNNWDYAGSTPTGDWRSAMSLPREVCLARVDGQVVLLQEAVDPFSGSESAIFQLGPQSLAPGVLELPATAAVARIDVEFEPGTADTVGLVVRAGGEGDERTLLTYDVAAGVLYLDRRESGHVSFHGTFPSVERVAVPLQEGRLRLRIYLDRCSVEVFAQDGLATITDLVFPAAASTALAVFAEGEGAHLAALAVVGC

SEQ ID NO: 779 - protein, 525 aa, Unknown
  Description of Unknown: Pseudarthrobacter siccitolerans sequence
MSSYLDAARLETAPAETSGFRPAIHFTARDTWLNDPNGLVFHDGLYHLFFQNNPYGNVWGNMSWGHATSRDLLHWTEHPVAIACDGNEDIFSGSVVVDHGNTSGFGTAEAPALVAIYTSAYKAASEYNGTQAQSLAYSTDAGMTWRKYEGNPVLTRNSAHFRDPKVFRYQGEAGDYWVMVAVEAQHQTVVLYRSEDLKTWEFLSDFGPANADAGEWECPDLFPLAVDGDPDNIKWVLIVNVNPGAVAGGSGGQYFVGHFDGVRFVPEPGSLVAPGGLSSLPDPEARSAALQQCLWLDWGRDCYASVSFSNAPDGRRIVIGWMNNWDYANHLPTAPWRSSMTLAREVRLTEVNGSARLVQQPVLAQPGGALLASEEQLNAGTFELRNSARRLPDAVPGSAQIIDAEIVPGASERVGLRLFGGHDGSEGTVLSYNTASARLVLDRRQSGNTGFHEKFPSMESAPLVLEDGVLKLQIVVDHCSVEVFAQDGKVVLTDLIFPDAEHGENWLSAEGGPATILKLSVSTLT

SEQ ID NO: 780 - protein, 499 aa, Sinomonas atrocyanea
MTSIASAPTRDRYRPRLHYTPARNWMNDPNGLIFHRGVYHLFYQHNPFGADWGNMSWGHATSTDLHTWAEQPVAIPCDDEEAIFSGSAVVDERNTSGFGDGSAAPMVAVYTSAYGKESSRPGIQAQSLAYSLDEGRTWTKYAGNPVLDRGSSDFRDPKVFWYEGPAGAYWVMAAVEAAEQRVLLYKSADLIHWEYLSDFAADGPPESVWECPDLFELPLDGDPERTVWALIVSVNPGGVAGGSGTRYFLGSFDGVRFTEQSTQPSTAPPREPSLRGSWLDWGRDYYAAVSFGGLPHRRVMMGWMNNWDYAAATPTGVWRSAMSLPREITVRTVNGHPRLIQTPIVPPAAQTTDATEVLGAAGSGRRAALATPAHGKVHRVSISATAPAAGTFGLRIGGPGAEGARLTVDPAAGEIRLDRRGSGRVDFHQDFPSIERAPLEAGERMDLEVYIDACSLEVFIQGGLATITDLVFPHGRDTEIELFADPSVVLATVEVAVLG

SEQ ID NO: 781 - protein, 880 aa, Unknown
  Description of Unknown: Pseudarthrobacter siccitolerans sequence
MKGDTSNMKQSTLRGARCVSALTLASLSLATALAGAMPASAVELGDELHRPAIHYTPEKNWMNDPNGLVFHKGVYHLYYQHNPSGNTWGNMSWGHATSKDLVHWEEQPLAISTDAQEDVFSGSIVVDKNNTSGLGTAEDPPLIAIYTSAYKEASPHRGLQAQSLAYSLDDGQTWTKYDGNPVLNRNSANFRDPKVFWYDNPAGGGYWVMTAVESQEHKVVLYKSDNLKDWTALSDFGPANATGGQWECPDLFPLAVDGDPNNVKWVMIVSINPGGVAGGSAVQYFVGNFDGTTFTSETTKPAAAAPAGTVLAGFNDGTYSGWTVNNEPGNWKNGPFADAPATGSLPGQSPVTGFGGSGLINSFNDGDWPLGSMQSPTFTVTDDYLNFLIGGGKHPHVSDKLDNNPPEGELKFDGFEVPDGKTLADSGWTGTGDLTPNFQPATSGGDYYIGAKRINTFETGTVPGDDRQGTLTSPEFPITKGFMSMLVGGGNRSADSGQTLAVQLLINGNVVRSLAGENGGLLNWKGWDVSEFAGQTAQLRIVDQATGGWGHLTLDHVMLTDTAAVPRSDEETVNLVVNGKVVRTATGNDSESLDWASWDVKEFVGQQAQIKVVDNNRFGWGHILADEFTASPAPAASRLESYDWLDYGRDYYAAVSFGNMPEDKRIMLGWMSNWDYANNIPTNPWRSAMALPREVKLTQTPDGPRLTQSAVQQVDALGGKVSYQNKKGGPIFEGTHPLPSQSSGQVERVDLSFAPGTATKSGITVLGDGESSTVIGYDATTGKMFVDRTKSGNTTFHPAFASIEDAAVTLDKNGNVTMRIYVDRSSVEVFAQNGLKTITDQVFPNPGADKMALFAEGGTAQLKSLTVTPLEQAMFLPEKK

SEQ ID NO: 782 - protein, 501 aa, Pseudomonas mucidolens
MDKVYYQEKFRPQFHFTPETNWMNDPNGLVYYEGEYHLFYQYHPFGNTWGPMHWGHAVSKDLIHWDHLPIALYPDHIGQIFSGSAVIDWQDTSGFFNGGAGMVALFTHADKFPDSGRPRQRQSLAYSTDRGRTWIKYEGNPFFADEAMTDFRDPKVFWHKASNKWIMILAAGNCVRIYHSSNLKQWKFASEFGANEGSHTGVWECPDLFELPVDGDRNRKKWVMVVSIGNSDEYLEGSRTQYFIGQFDGIRFTNENDPETVLWVDHGRDNYAGVTWSDIPEEDGRRLFIAWMSNWKYANHTPTEIWRSAMTIPRSLSLRSTPEGTRLFQTPVTELESLRLEKLEWKDLEVTTNGNVLSNISGDIFEIIAEFELNTALEFGFKVRKSADQETIVGYDAEQQMLFIDRTQSGVSDFCEHFPCKHGAVMIPNQNRIQMHIFVDRSSVEVFGNNGELTMTDLIFPDDSSTGIEVYAKEGNVKLVSLMLFPLMPIHSHLKSFVMNN

SEQ ID NO: 783 - protein, 584 aa, Unknown
  Description of Unknown: Pseudocercospora fuligena sequence
MMLGLWEVCRYFLTMWSSSILPVAALLAHQAAAQVSANPTSTYYAPGIPTDAPVPGNYNDYLRPRVHFSPPRYFMNDPNGMHRGADGLWHMYYQYNPLTPVAGNQHWGHATSEDLYTWENQKIALWPPNNYTYVFSGSAVLDPNNTSGFFPDQDNGVVAIYTLAEYPGGVQGVQYQAIAYSRDDGYTFEAYEGNPVLDINSTQFRDPYVIWHEPSSQWVMTIAYAAEFVIGVFTSPDLKEWTHASNFTKHGYLGVQYECPNLLQMPMRGQEEPVWFLVISINPGGPRGGSVSQYFVGDFNGTHFEPFDDATRLTDFGKDNYAAQFFHGVPANEPQIALGWASNWQYTQLVPTGLLEHGQFRSAMTVPRAHTIANISARGYDLISEIHNISAVVDSELAYNSSLGNGTIMTYFGDVESGAIYFEANITNLTSSTRQGTANFTISSSLSGEYIQGGIKVAGEPGIWINRGNIRGFDNPYFSDKFSEEGTFVPAAGSWDMSVVVDRSIIEIFLNGAQAAGTLTFFPTAPLDTLAVYVGGIDETASSSVAVWGLKDTWAPQADVNGTVAGNVTQVDMSERRRWSERLV

SEQ ID NO: 784 - protein, 1039 aa, Talaromyces sp.
MKSISMRWEVLLLGAFLSQVDAAPTKESYTELYRPQYHFTPAQNWMNDPNGLLYADGTYHMYYQYNPGGNTWGAMSWGHATSEDLTHWKEQPVALLARGYPNNITEMFFSGSAVIDEHNTSGFGKKGKAPWIAMYTSYYPTAQVLPSGKQVRDNQQAQSIAYSLDHGTTWTTYDEANPVILDPPAPYQDQFLDFRDPNIFWHQPIRKWVAVVSLAKLHKLLIYTSTNLKQWDLESEFGPFNAVGGNWECPNIFPLPVDGDKSKVKWVAIVGINPGGPPGTVGSGVQYFLGDFNGTTFTADSNSIHGGGPPDGSFIFEDFEGNRSFGDRGWVATGDFIGTSPVAGTLPGQNPVTGFLGNQLVNTFLNGDATTGTLTSPSFTVSYKYINFLIGGGDNINQTAIQLKIDGNVVYAATGSNSEQLTWQNWDVSAFQNQTAVIEIIDLATGGWGHINVDEISFANTPATNNNANWLDWGPDFYATQGYNGLPQYQRTIISWMNNWQYGGVIPTSPWRSAMSIPRQLSLKTIDESIAVVQEPEECWKAITRTQIASTFPSITGTHSLGDIGNAVEIELTFSSGDGTNGGSEFGIIVRASKDFSQQTRIGYDFTTEQVFVDRTKSGDVSFDSTFASVYYAPLSPASDKTVTLRIFVDWSSVEVFGGQGQTTMTTQIFPDENATNAQLFSTGGSTKNVQLRISKVRNHAFYLVKRDVSRPVNDPDALVLEAWSQGLMTGSLVIMAAITYVNMRSGVWLHKMILLELILAMPHGTFIFASEPAYGWYLATTAIGLIVSWSLHNVIAWMKNKAFMSRRLSLAYVGTIILAQPYWAVEIFANFAYFNDIDPFFYEKTRPLEALFRYGHTEMNMLIVALCLCCGLTYGVSSDPWWIFTTCNLFWVVKTHYNFGILELVRESPRFGLMLASMGLSIAFLILDILSVTGVLRVTETMGINPFWKLCFVFKCLCDTVILDDFKTALDKLSIRWLRQRGMHTLVPPAVDANELTQPIGGASDARNHSMFSDEHAPQSVHHEISPLKSSVSVTHCA

SEQ ID NO: 785 - protein, 489 aa, Unknown
  Description of Unknown: uncultured Bacillus sp. sequence
MDRIQQAEEALKEAEGKVKQRYRLGYHIMPRANWINDPNGLIQFKGEYHVFFQHHPYDEHWGPMHWGHVKSKDLIHWEHLPVALAPGDEFDQSGCFSGSAVDDHGRLALIYTGHNIIDQEKDLFYQTQNIAVSQDGTVFEKLQENPVIAEPPEDSARHFRDPKVWKHRDVWYMVIGNSSKENVGRVVLYRSPDLRDWEYAGVLAQSDGNLGYMWECPDFFELGGKHVLLISPQGIEADGDSYQNLHQTGYLIGDYHDETNKFTHGAFKELDHGHDFYAVQTLLDDKGRRIAIGWMDMWESEMPTKADGWCGALTLPRELTLRDDHKLLMNPVEETKQLRKMEYRECAGRSVSGSYLAKTSEDLLEVRAVFDVNDSDAEAAGFKIRGLDEEELVLTYNLTDKKLTLDCTKMGKAKDGVRRVQTDTNGKLALRIFIDRSSIEVFANHGETTMTSRIYPNEGRLGIELFSEKGAVKVEEFTYWTLKDIWKRS

SEQ ID NO: 786 - protein, 509 aa, Unknown
  Description of Unknown: Meyerozyma sp. sequence
MIALLTLLCFTFVAMVESSRPLLAFTPSHGWMNDPNGQFYDAKNDLWHLYYQYNPNDTVWGTPLYWGHATSKDLSTWKDYGATIGPDNDEDGVFSGNIVIDYNNTSGFFNESIDPRTRVVAIYTYDTPTSQTQHVAYSLDGGYTFEKYAHNPVLELNSKNFRDPKMFWHEPTSQWIMVIALSQEFKIQIYGSTDLTSWSLHSNFSGGFYGFQYECPGLVEVPIEGSDESKWVMILAINPGSPLGGSANQYFVGEFDGYEFVPDDHQARLMDYGKDFYAFQTFDAPKDKGVVGLAWASNWQYAGVAPTKEWRSSMTVARKVSLAYRNMNPETKILSLLQYPILGESVVSENQISKSNVTAQGDQAITLHQNSTGTYSFDITFSLDPEKDQDGVFEVISGSDDEFVRAGFSSGQFFVDRGNTTGLKENPFFTDKTAVYVEPLEQKDGRSVYKIFGIIDGNIMEVFVNDGVASLTNTFFIPVTEGLEYLEVKSTIEAAIIEEVELKELQLKS

SEQ ID NO: 787 - protein, 730 aa, Quercus suber
MVYSLAKTLYKRQRTLQFCAYILCLLISCYCAVDPALLFSRMKTAASAFALLGALPSTYAWGSPPFGQWGRPQSGPDHHGSPPHHGRPAWTSTSSAASAPPSATQDCTALTSDEIQAAGNNSLFTRWRPYSHVLAPAGWMNDPCAPMYDPTRDEYHIFYQWHPQHINWGNISWGYATSKDMVTWVDHNGWRDSEAKALGPAGNGTYDGLGIFSGTGQPVNLKGEVDGTLLLMYTSVSWLPTSWAIPYHPGTETTSLALSTDGGKTWEQYEGNPIIDATTETAPMYWNLTGFRDPFFQPWPAMDELLDVSEPHYYAVYGSGIKGVGPRIPFWTAPASDLTSWKFLGALWEPADNTTLGPLLSTGTYGFNFEVSGFFSLPDRSGDLHYFVNMGSEGGNVSFHESAHWSLWNEGTVTRRSNGSAQFTPIAGGAGDWGLSYALTSFNDTKHNRRVQWAWAPEDLVGDGGLFSASQQGFQGSLTFPRELFVHEVDNVVNDGTVAESKNAALTKEANGLYTAQTLGVRPLADVVEALHAGATYHSYDAATYHHSELLVTQASSHMHLRAVISSSSSNTAPFGLTIAASPDAGATEATHILYSPTNHTILVDRAHSSTIDGFANSTVTGYFAPYTLHSPASNTTAPEPLVFDVFVDGSLVEIYLNDRFALTTRVYPSMLCSTGFGVYVADGARADVAELQAWVGLREAWPQRPRNSSSPLLWDTPEETNDYTWWAGN

SEQ ID NO: 788 - protein, 593 aa, Unknown
  Description of Unknown: Cercospora beticola sequence
MSGSYVSTMLFKSIIPAAAVFAREAAAQAAGTSNTATGLPDVFPNATATYFAPGVPTDAPIPGNYTSYLRPRVHFTPPRYFMNDPNGMHRSPDGTWHLYYQYNPITPVAGNQHWGHATSQDLYTWTNQKIPFFPPNDYTYLFSGSAVVDTNNTSGFFPDQDNGVVAIYTAAEYPNGQQGVQYQAIAYSRDGGYSFEAYEGNPVLNLNLTQFRDPHVIWHAPTSRWVMTVAFATEFVIGIYTSPDLKEWEFASNFTSHGYLGVQYECPNLVQVPMRGQDEPVWFLLISINPGGPRGGSVSQYFPGEFNGTHFVPYDGATRLTDFGKDNYAAQFFYGTEAGQAPIALGWASNWQYTSLVPTGLIENGQFRSAMTVPRTFELANISMRGYDLVSAPYNIEAVLDNELAYNSSLGNGSVISYFADKVESGAIYLEANITGLTSTTRRGTANFTISSSVTGEYIRGGIKVAGEPGIWIDRGNLLGFSENPYFSDKFSEEGTFVPDDGSWDLKVVYDNSIIEVFLNGAQAVGTLSVFPSRQLDTVAVFVGGIPANASSSVGIWGLKDTWAPQADGNGTVQGNVTQSSGYVSQRSLFGEQ

SEQ ID NO: 789 - protein, 644 aa, Unknown
  Description of Unknown: Cercospora beticola sequence
MRSTTTAAAVLAAAPLAYGWNLPNVFKRQNDQCDTITTEEIKNLPNNALFTRWRSQSHFIAPAGWMNDPAGFMYDPVRDEYHGHYQWHPNHINWGNISWGGAVSKDLINWEDQGGWRDAEALALGPTGNGSHDGLGIFSGSALSVNLQGEQDGTLLLFYTGAQFLPTKWLFPYTRGTESQSMALSTDGGKTWERLENNPVINASTNEPPMNWDLTGFRDPFIEPNPELDALRGVEKHFYSVWGSGIKGVGPRMPLWAAPANDLTNWTFLGSLWEPAQNTSLGPILSTGQYAYNFELSGFFRLKDRAGEDHWYTNMGTEGGGGPDVPFHTNAQWQLWNEGEVVRRQNGSVEFIPTIGGAGDWGLGYAATSFNDTKNNRRVQYAWIKEDNLGDQALFSAPQQGFQGALTIPRELFVHEVDGVTNTTELTEAKFVTVKNGTAFTLGVRPVEDVADGLREVAAYSDFAPRTYDRSTILQSNTTSHVNIKATVKNATGPVGLTIGASPDGEEFTNIIYEPSNYTILVDRRQSTTMDLFNRETITGYFQPYKLLSTNETEEISFDVWVDGSAVEIYVNERFALSARIYPSKTCSTGWGVFVGEDSEAEFGKVEAWDGTKNVWPQRPANSSSELVIDTPEETNNGAWWIGN

SEQ ID NO: 790 - protein, 285 aa, Unknown
  Description of Unknown: Trametes pubescens sequence
MYVLTISINPGAPLGGSITEYFPGTFNGAHFTAVDEAARIPDFAKDNYAGQFFYGTLDGEDAVSIAWASNWQEGWRSAMSLPRRNRLENVTRVGWDLISLPYDLRPVLGQQLASRTDLVDSTLEVDYSGVASNAIYFEANVTGLAGVGSASTLNFTIRNPEAGESVRGGYFFGDQFFVDRGGVRGFDNPFFTDKFSTLSLLRPDGTWTLSGVVDRSMLEVFVDRGTTSATALFFPTQPLTVLTLSTAQLPDSVSVSVAVYALESGWKGSENGEGIVVGNVTTTAV

SEQ ID NO: 791 - protein, 562 aa, Ceratocystis fimbriata
MPSKGWLNDPCGPVYDSHKETYHVAFQWVPEAIEWNYDVRWGAATSKDMINWEVYEEPSIKPEASYDRLGVYTGAVLDMNINGVSNGTLTATYTAVDTQPISWRWKYNRGSESLALAFSDDSGVTWQRYEGNIILESGPEDVDLLSWRDPYISKWENVEKLLHDGETGKYLYGIISGGVRDVTPTTWLYEIDSDALQNWRYVGPLVDLSMKFNPDPKWTGSFGSNWEVCNFVDLTTADKALRRDFLICGIEGKVDDISNLEEQGVLRTDKAQTWLRGGLSKEDDSVRMAYENGGQLDYGMVYATNSFFDPISQNNVFWGWVFEEDLPERYLLTQFFAGIVTVPRTIEFWTLDNVIGSLASPLSEIGSIEVTPGSDGSSSRVSGLAGNPESRLVGLRRKHIPVHNNKRWTGLGTKTNLPSRFEGLELQVSARVAPSSKDLGIRLHHANGEYTTIFFSAANEQITIDRKSSTHWPDVRTVDEIAPHTLFQYADKSWETLELRMIFDRSSIELFANGRTALTTRVYPISGAINAIELLHENGDDSSVFLSADVWSLEAQITHVSS

SEQ ID NO: 792 - protein, 625 aa, Ceratocystis fimbriata
MVAQTSIARALSLAAIAAIPVSSFAVQPSRASQGYDDEKCLKMAVSNSTLSNDCLKFRPKLHVMPSKGWLNDPCGPVYDSHKQTYHVGFQWVPGAIEWNYDVSWGAATSKDMINWEVYNTPSIKPEASYDHLGVFTGAALDMNINGVSNGTLTAAYTAVDIQPISWRLNYNRGAESLALAFSEDSGVTWQRYDGNIIIESGPEDVDLLSWRDPYISKWENVEKLLHNGETGKYLYGIISGGVRGTTPTTWLYEIDANALQNWRYVGPLVDLSMKFNPDPKWTGSFGSNWEVCNFVDLTTADKALRRDFLICGIEGKVDSTDNLEEQGVLRTDKAQTWLRGGLSKKGDSVRMAYENGGQLDYGMVYATNSFFDPISQSHIFWGWVFEEDLPERYLLTQFFAGILTIPRTIEFWTVDNVIGSLASPLSEIGSIEVTPGSDGSSSRVSGLAGNPEPRLVGLRRKHVPVLKNKLGSAPRTKTTLCSRYEAMELQVSARVAPSSKDLGIRLHHANGEYTTIFFSAGDEQITIDRKNSTHWPDVRTVDEIAPHTLFQHADKSWETLELRVFFDRSSIEVFANNRTALTTRVYPISGAVDAIELLHERGDDSSAFLSADIWSLDATVTHVDS

SEQ ID NO: 793 - protein, 413 aa, Unknown
  Description of Unknown: Phialophora attinorum sequence
MFTANSPEQQEQAIAYSRDDGYTWTLYANNPVIAINSKNFRDPKVIYHADSGNWVMVLAYATEFTIGVFTSPDLTTWTPASNFSYAGLLGLQYECPNLVQMPYKNASTGETISTVWLLYISINPGAPLGGSVGQYFAGDFNGTHFTPLDNAARIADFGKDNYATQFFYRNDDFGTEDAVSMAWASNWQYTNYVPTGPAEGWQSAASLPRRNWVQDSVRGGYVLASYPYDLDVVLGRELGSSENLVNDTLVATADASNTTGAFAISANITGLNTTLLSNTASLNITIRSSATGETLTSGQTFAGDATFWMDRGNTTAFDNPFFTDKVSTALVLQDAWELLMVVDRSVWEVFLLGGERSATQTFFAEGMMNEVEVSVAALNEGSVVSVKVWELKSTWAEMEEGMGDVRGNVSAIG

SEQ ID NO: 794 - protein, 491 aa, Unknown
  Description of Unknown: Trametes pubescens sequence
MKFCTVVGLVTALVGGAVAQDTTLPAVPTGTPIPGDYNGAYRPQHFMNDPNGMFLDANGTYHLYYQYNPTANVAGNQHWGHATSRDLYHWINQPIAIFPPTNDSQVFSGSAVVDVNNTSGFFPDQNNGVVAIYTLNTPTAQVQEISYSHDGGYTFAAFAENPVINSTSTQFRDPKVIWFEDHWVMVISYSQEFAVGIYTSPDLKTWSHASNFTHHGLLASTRADGAARVADFAKDNYAGQFFYGVPDGQDAVSIAWASNWQYTQVVPTAQEGWRSAMSLPRRNFLANVTRIGWDLISLPYDLSPVLGEQLASSTSLVNSSLVVDYSGVASNAVYFEANVTGVSGSSSAATLNFTILSPVSGESIRGGYYFGGDNPFFVDRGRVRGFDDPFFTDKFSTSTVLRADGTWTLSGVVDRSLLEVFVDGGVASATASFFATQPLTLLTLSTAQLPANASVSVAVYALQSAWKEYENGEGNVLGNVTTTAEVKRDEL

SEQ ID NO: 795 - protein, 704 aa, Talaromyces sp.
MAIMMKVLLLGLSAFQLVSAGNSSYTELYRPQYHFTPSINWMNDPNGLLYCKGIYHLFYQYNPGGTTWGAMSWGHATSRDLTHWEHHPIALEARGFPNNITEMFFSGSAVADVDNTSGFGHNGKTPLVAMYTSYYPIAQTLPSGKKVQKDQQAQSIAYSLDDGMTWITYDVANPVILDPPAPYSDQFLDFRDPNVFWHEPTKKWIAVLSLAKVHKLLIYASKDLKNWTLASEFGPVNAVGGVWECPNLFPLPVDGNKNNVKWVALLGLNPGGPPGTIGSGSQYIVGNFDGTTFTADSDSIYSGTTAPPSDSIIFADFEGTGTFTDLGWTPSGDLIGQSPVSGTLPGQQSVSGYLGKRLVNTFLDGDATTGTLTSRSFTISKRYINFLIGGGHDFNNTAVYLKIDGEIVRSATGTNSETLSWQSWDVSSFLNQTAVIQIIDTATSGWDHINVDEISFSDTMARSQVANWVDWGPDFYAAQVYNGLPIGERVAIGWMNNWQYGGLIPTSPWRSAMSIPRDLSLKTVGGKVTLVQSPRENWGSIVSRKCFDQSWSFVKEGTQSLGSVGMALKIDLSFSDLEPAASGSSQFGIAVRATPDSKQQTRVGYDFATKELFIDRTQSGDISFDGTFPDIYYAPLAADDKGQINLEIYVDWSSVEVFGGQGETTITTQIFPNDIASYAQIFSTGGSTQNVRVSINNISSAWDD

SEQ ID NO: 796 - protein, 698 aa, Unknown
  Description of Unknown: Pyrenochaeta sp. sequence
MAFSIRRAVVFGLCALQTAFGQKYTELYRPQYHFTPKENWMNDPNGLIFHNGVYHMYYQYNPGGATWGAMSWGHATSRDLTHWEHHPVALLARGFPDNITEMFFSGSVVADTQNTSGFGSKKKVPLVAVYTSYYPMAQTVPSGKQIRENQQAQSIAYSLDDGLTWTTYDAANPVILDPPQQYADQYKEFRDPNVFWHDSSKKWIMTIALAQLHKMLIYTSSDLKNWTYVSEFGPVNAADGVWECPSIFPLPLDGNKGNTKWVVQIGLNPGGPPGTIGSGTQYVVGNFDGKKFTADANSVYSPPTIPADSVVFQGFEGSGTYADLGWNATGDFLNAAPVTGTVPGQQTVTGYVGSRLVNTFLNGDATTGTLTSPSFKISHKYINFLIGGGYNPGQTAINLKVGGQIIRTATGGNNEKLVWKGWDVSAFSGSTAIIEIVDSLTGGWGHINVDEISFSNTLAQTQKANWVDYGPDFYAAIPFNGLPITERIDIAWMNSWQYGGVIPTSPWRSAMSIPRKLSLKTVNNKATLVQEPKQDWESRRSFSRSWRTVNNGTQKLDFSGKALDITIAFDDQTPAASQSPQFGLILRATSDLSQQTRVGYDFTTKQIFVDRSKSGNVGFDSTFPATFYAPLSADRHGKITMRILVDWSSVEVFGGSGETTLTAQVFPSDEAVQVQLFSTAGSTKDVQISASSIKSTWN

SEQ ID NO: 797 - protein, 892 aa, Arthrobacter sp.
MKGDPSTMHQKKIGSLQLCTALTVAGLSLAAVLAGAGTAAAAGTAGDEQFRPAYHYTPQQNWMNDPNGMVFYKGVYHLYYQHNPFGNQWGNMSWGHATSTDLVHWKEQPLAIATDDQQDIFSGSVVVDKNNTSGLGTAENPPLVAIFTSAYKDASPYRGLQAQSLAYSVDEGRTWTKYSGNPVLNRNSANFRDPKVFWYDSPGGGGYWVMAAVEATEHKVLLYKSGNLKDWTQLSEFGPANATGGLWECPDLFPLAVDGDPANVKWVMVVNLNPGGVAGGSAGQYFVGNFDGTTFTSETTKPGGALPAGTSLAGFNDGTYNGWTVSNEPGNLKEGPFAGAPAAGTLAGQNPVTGFAGAGLVNSFNDGDWPVGSMDSPEFTVDSDYLNFLVGGGQHPRVSDKLDNTPPPGDLLFNGFEVPDGSTLADAGWAGTGDLEPRFQPATAGGDFYIGAKRINTFETGGAPGDDRQGTLTSPSFTVNRNFMSMLVGGGHRTAGSGQTLEVQLLVNGTVVRTLAGDDAGALNWKGWDVSEFAGQQAQLRVVDQATGGWGHLTLDHVMLTDQAAVPRSDETTVNLVVDGKVVRTATGANSEVLDWASWNVAEFRGRQASIRVVDNNRFGWGHILADEFIASPRPATPRLQTYDWLDYGRDYYASVSFSNMPQDKRVMLGWMNNWDYANSIPTSPWRSAMSLPREVALTQTADGPRLTQKAVQQVDGLGTKESYAEKRARSIPAGTHPLPAAAWGDVQRIDVTFSPGSASKAGITVLGNGGKSTVIGYDKAAGELYVDRSNSGSTDFHPLFASVESAPVTVDGSGNVTLRIYVDRSSVEVFAQDGLRTITDQVFPEQAAFQQDANQVALFAEGGTARLKSLSVTPLSQSMFQAAQLPARNGK

SEQ ID NO: 798 - protein, 428 aa, Unknown
  Description of Unknown: Eutypa lata sequence
MVPYIRRALLSGLCLTHAASAQNYTERYRPQYHFTPATNWMNDPNVPNGTGFAKRANPVILSPPDEYADQILEFRDPNVFWHDVSQQWVSVISLAKLHKLLFYTSANLKDWEQVGEFGPANAVGGVWECPSIFPLPLDGDGDLKWVAQIGLNPGGPPGTTGSGTQYIVGDFDGATFTPDAESVEQTNWMDWGPDFYAAISFSGLPLEDRVNVGWMSNWQYAAAIPTDPWRSAFSIPRNLSLHTINGKATLVQQPIVEVGDQETTSEHWDSLAAGTTKLNFTGKTLDITLTFAESDSTQFGIIVRATPDLSVQTQVGYNFASQQLFVNRTKSGESGFEGSFADVYYAPLPPQDGNVTLRLLVDWSSVEVFGGAGDVTLTAQIFPSDDAVDAYLFSTDGSTSNVDISAMNVPSIGPGASQTSPPDSRRRR

SEQ ID NO: 799 - protein, 501 aa, Sphingobacterium sp.
MIKLKKYGVLMLLLGVFGTSLAQTGQHKQGDPEEKYRPLYHFTPQQGWMNDPNGLVYLDGNYHLFFQHNPEKPVWGPMHWGHAISKDLIHWDEQKIALYPDSLGTIFSGSAVIDKDNTAGFGKGAMVAIFTHHNHQEEDRKTGLHQNQSLAYSLDKGLTWTKYKGNPVLPNPGIWDFRDPKVMWHVHSQRWIMTLATKDCITFYSSKDLKTWQKESEFGKEVGAHGGVWECPDLIPMDYKGTTKWVLLVSINPGGPNGGSVTQYFVGDFDGHQFRTTDTKIKWLDWGPDNYAGVTWSNLGDRQLMIGWMSNWQYANVVPTTKWRSSSTIPRVLSLGKVGQSFYVASTVPKEIETAFRPLKKYHGGGTKEVSFEQHLPQAYRLDLKDLKQQAFKVILSNESGDELVIGYREDQNAYYIDRSKSGEVSFNGEFPKIALAQRPLNKGALSFSLYVDVSSVELFADEGLTVMTSLFFPNKPITKLRIVGDKKLEFQEIGISAFKR
